(19) United States
(12) Patent Application Publication
(10) Pub. No.: US 2025/0295809 A1
(43) Pub. Date: Sep. 25, 2025

(54) COMPOSITIONS AND METHODS FOR THE TREATMENT OF HER2 POSITIVE CANCER

(71) Applicant: VOYAGER THERAPEUTICS, INC., Lexington, MA (US)

(72) Inventors: Dan Richard LAKS, Cambridge, MA (US); Samuel Aaron HASSON, Arlington, MA (US); Kelly BALES, Lincoln, MA (US); Kenny CHEN, Watertown, MA (US); Usman Yasin HAMEEDI, Malden, MA (US); Xiaoqin REN, North Attleboro, MA (US); Ishan Sanjeev SHAH, Andover, MA (US); Mathieu Emmanuel NONNENMACHER, Boston, MA (US); Tyler Christopher MOYER, Boston, MA (US); Jiangyu LI, Watertown, MA (US)

(21) Appl. No.: 18/862,369

(22) PCT Filed: May 11, 2023
(86) PCT No.: PCT/US2023/066905

§ 371 Date: Nov. 1, 2024

Related U.S. Application Data
(60) Provisional application No. 63/341,857, filed on May 13, 2022.

(51) Int. Cl. A61K 48/00; A61K 45/06; A61P 35/00; C07K 14/005; C07K 16/32; C12N 15/86

(52) U.S. Cl. CPC A61K 48/005; A61K 45/06; A61K 48/0075; A61P 35/00; C07K 14/005; C07K 16/32; C12N 15/86; C07K 2317/31; C07K 2317/52; C07K 2317/565; C07K 2317/71; C12N 2750/14122; C12N 2750/14143; C12N 2750/14151; C12N 2830/50

(57) ABSTRACT

The disclosure provides compositions and methods for the preparation, manufacture and use of an adeno-associated virus (AAV) particle for the vectorized delivery of an antibody molecule that binds to HER2.

### RELATED APPLICATIONS

[0001] This application claims priority to U.S. Provisional Application No. 63/341,857 filed on May 13, 2022; the entire contents of which are hereby incorporated by reference in its entirety.

### SEQUENCE LISTING

[0002] This instant application contains a Sequence Listing which has been submitted electronically in XML format and is hereby incorporated by reference in its entirety. Said XML copy, created on Apr. 20, 2023, is named V2071-3003PCT_SL.xml and is 5,053,643 bytes in size.

### FIELD OF THE DISCLOSURE

[0003] The present disclosure relates generally to compositions and methods for vectorized delivery (VAD) of an antibody molecule, e.g., an antibody molecule that binds to HER2.

### BACKGROUND

[0004] Breast cancer is the most common form of cancer and the leading cause of cancer death in women worldwide. Today the systemic treatment of breast cancer offers three major different treatment modalities and the applicability of these different treatment options is substantially dependent on the receptor status of the patient (Bernard-Marty et al., “Facts and controversies in systemic treatment of metastatic breast cancer” Oncologist 9:617-632 (2004)). Endocrine and biological therapy requires the presence of the respective receptors on the cancer cells, whereas cytotoxic chemotherapy is independent of those specified receptors.

[0005] Although HER2 receptors are found overexpressed in various cancers, many of the cancer therapies targeting HER2 have been developed for breast cancer. HER2 overexpression and/or amplification have been detected in 10%-34% of invasive breast cancers and correlate with poor prognosis, and poor response to chemotherapy and endocrine therapy. Amplification and/or overexpression of HER2 may play a role in the occurrence or progression of brain metastases. The incidence of brain metastasis in patients with metastatic breast cancer varies from 10 to 15% and these rates increase up to 30-50% in patients with HER2+ breast cancer (Aversa et al., “Metastatic breast cancer subtypes and central nervous system metastases” Breast. 23: 623-628 (2014); Kennecke et al., “Metastatic behavior of breast cancer subtypes” J. Clin. Oncol. 28: 3271-3277 (2010)).

[0006] Brain metastases accompanying breast cancer are associated with particularly poor prognosis. Brain metastases seriously affect quality of life and are relatively resistant to systemic therapies. Though the biological basis is not yet fully understood, patients with HER2-positive breast cancer are at a particularly high risk of brain metastases. Currently, the standard component of systemic therapy in HER2-positive breast cancer patients is trastuzumab, a monoclonal antibody against the extracellular domain of the HER2 receptor. However, due to a high molecular weight (approx. 145,000 Da), and physical and chemical properties, trastuzumab does not cross the blood-brain barrier and is ineffective in preventing and treating brain metastases. In highlighting the potential impact of a therapy addressing brain metastases arising from HER2+ breast cancer, one study found that approximately 50% of their cohort of 122 women ultimately died of cerebral progression (Bendell et al., “Central nervous system metastases in women who receive trastuzumab-based therapy for metastatic breast carcinoma” Cancer 97(12):2972-2977 (2003)). Therefore, targeting the CNS progression of the tumors is a major unmet need tied to the shortcoming of current therapies (biodistribution, efficacy) and the patient outcomes when the metastases are unmitigated. As such, there is a medical need for improved compositions and methods of prevention, treatment, and diagnosis for diseases associated with overexpression of HER2, such as metastatic breast cancer.

### SUMMARY

[0007] The present disclosure pertains, at least in part, to compositions and methods for the treatment of a disease or disorder associated with HER2 over-expression, e.g., HER2-positive, HER2-amplified and/or HER2-mutated cancer, including modulating the activity of HER2 (e.g., inhibiting HER2 signaling), inducing antibody-dependent cellular cytotoxicity (ADCC), and/or delivery, e.g., vectorized delivery, of an antibody molecule that binds to HER2, e.g., an anti-HER2 antibody molecule described herein. In some embodiments, the level of HER2-mediated cell signaling and tumor growth, is reduced or inhibited using an isolated, e.g., recombinant. AAV particle comprising a genetic element encoding an anti-HER2 antibody molecule, e.g., an anti-HER2 antibody molecule described herein. In some embodiments, the inhibition of HER2 dimerization, downregulation of HER2, and antibody-dependent cell-mediated cytotoxicity is increased using an isolated, e.g., recombinant, AAV particle comprising a genetic element encoding an anti-HER2 antibody molecule, e.g., an anti-HER2 antibody molecule described herein. Such inhibition and/or degradation can be useful in treating disorders related to over-expression of HER2, such as cancer.

[0008] Accordingly, in one aspect, the present disclosure provides an AAV particle comprising an AAV capsid variant and a nucleic acid comprising a transgene encoding an antibody molecule which binds to HER2/neu (e.g., human HER2/neu), wherein the AAV capsid variant comprises an amino acid sequence having the following formula: [N1]-[N2]-[N3], wherein: (i) optionally [N1] comprises X1, X2, and X3, wherein at least one of X1, X2, or X3 is G; (ii) [N2] comprises the amino acid sequence of SPH; (ii) [N3] comprises X4, X5, and X6, wherein at least one of X4, X5, or X6 is a basic amino acid, e.g., a K or R. In some embodiments, position X4 of [N3] is K. In some embodiments, position X5 of [N3] is K. In some embodiments, [N3] is or comprises SKA. In some embodiments [N3] is or comprises KSG. In some embodiments, [N2]-[N3] is present immediately subsequent to position 455, numbered according to SEQ ID NO: 138, 981 or 982. In some embodiments, [N1] is present immediately subsequent to position 452, relative to a reference sequence numbered according to the amino acid sequence of SEQ ID NO: 138, 981, or 982. In some embodiments, [N1] replaces positions 453-455 (e.g., G453, 5454, and G455), relative to a reference sequence numbered according to SEQ ID NO: 138. In some embodiments, the AAV capsid variant comprises H at position 454 and D at position 455, numbered according to SEQ ID NO: 138 or 982. In some embodiments, the AAV capsid variant comprises S at position 454 and G at position 455, numbered according to SEQ ID NO: 138 or 981. In some embodiments, an insert of 8 amino acids replaces the SG at positions 454-455, numbered according to SEQ ID NO: 138. In some embodiments, an insert of 6 amino acids is present immediately subsequent to position 455, numbered according to SEQ ID NO: 138, 981, or 982.

[0009] In yet another aspect, the present disclosure provides an AAV particle comprising an AAV capsid variant and a nucleic acid comprising a transgene encoding an antibody molecule which binds to HER2/neu (e.g., human HER2/neu), wherein the AAV capsid variant comprises an amino acid sequence having the following formula: [N1]-[N2]-[N3], wherein: (i) [N1] comprises positions X1, X2, and X3, wherein position X2 is S and position X3 is G; (ii) [N2] comprises the amino acid sequence SPH; and (iii) [N3] comprises positions X4, X5, and X6, wherein position X5 is K (SEQ ID NO: 6612). In some embodiments, [N1]-[N2]-[N3] is present immediately subsequent to position 452 and replaces positions 453-455, numbered according to SEQ ID NO: 138 or 982. In some embodiments, [N1]-[N2]-[N3] is or comprises GSGSPHSKA (SEQ ID NO: 6613).

[0010] In another aspect, the present disclosure provides an AAV particle comprising an AAV capsid variant and a nucleic acid comprising a transgene encoding an antibody molecule which binds to HER2/neu (e.g., human HER2/neu), wherein the AAV capsid variant comprises an amino acid sequence having the following formula: [N1]-[N2]-[N3], wherein: (i) [N1] comprises positions X1, X2, and X3, wherein position X2 is an amino acid other than S and position X3 is an amino acid other than G; (ii) [N2] comprises the amino acid sequence SPH; and (iii) [N3] comprises positions X4, X5, and X6, wherein position X4 is K (SEQ ID NO: 6614). In some embodiments, [N1]-[N2]-[N3] is present immediately subsequent to position 452 and replaces positions 453-455, numbered according to SEQ ID NO: 138 or 982. In some embodiments, [N1]-[N2]-[N3] is or comprises GHDSPHKSG (SEQ ID NO: 6615).

[0011] In another aspect, the present disclosure provides an AAV particle comprising an AAV capsid variant and a nucleic acid comprising a transgene encoding an antibody molecule which binds to HER2/neu (e.g., human HER2/neu), wherein the AAV capsid variant comprises (a) the amino acid sequence of any of the sequences provided in Tables 1A, 2A, 2B, 15, or 16; (b) an amino acid sequence comprising at least 3, 4, 5, 6, 7, 8, 9, 10, 11, 12, 13, 14, 15, 16, or 17, consecutive amino acids from any one of the sequences provided in Tables 1A, 2A, 2B, 9-11, 15, or 16; (c) an amino acid sequence comprising at least one, two, or three, but no more than four different amino acids, relative to any one of the sequences provided in Tables 1A, 2A, 2B, 15, or 16; or (d) an amino acid sequence comprising at least one, two, or three but no more than four modifications, e.g., substitutions (e.g., conservative substitutions), relative to the amino acid sequence of any one of the sequences provided in Tables 1A, 2A, 2B, 9-11, 15, or 16. In some embodiments, the amino acid sequence is present in loop IV. In some embodiments, the amino acid sequence is present immediately subsequent to position 448, 452, 453, 455, relative to a reference sequence numbered according to the amino acid sequence of SEQ ID NO: 138.

[0012] In yet another aspect, the present disclosure provides an AAV particle comprising an AAV capsid variant and a nucleic acid comprising a transgene encoding an antibody molecule which binds to HER2/neu (e.g., human HER2/neu), wherein the AAV capsid variant comprises (a) the amino acid sequence of any of SEQ ID NOs: 945-980 or 985-986; (b) an amino acid sequence comprising at least 3, 4, or 5 consecutive amino acids from any one of SEQ ID NOs: 945-980 or 985-986; (c) an amino acid sequence comprising at least one, two, or three but no more than four different amino acids, relative to the amino acid sequence of any one of SEQ ID NOs: 945-980 or 985-986; (d) an amino acid sequence comprising at least one, two, or three but no more than four modifications, e.g., substitutions (e.g., conservative substitutions), relative to the amino acid sequence of any one of SEQ ID NOs: 945-980 or 985-986. In some embodiments, the amino acid sequence is present in loop IV. In some embodiments, the amino acid sequence is present immediately subsequent to position 448, 452, 453, 455, relative to a reference sequence numbered according to the amino acid sequence of SEQ ID NO: 138.

[0013] In yet another aspect, the present disclosure provides an AAV particle comprising an AAV capsid variant and a nucleic acid comprising a transgene encoding an antibody molecule which binds to HER2/neu (e.g., human HER2/neu), wherein the AAV capsid variant comprises (a) the amino acid sequence of any of SEQ ID NOs: 2, 200, 201, 941, 943, 204, 208, 404, or 903-909; (b) an amino acid sequence comprising at least 3, 4, 5, 6, 7, 8, 9, 10, 11, 12, or 13 consecutive amino acids from any one of SEQ ID NOs: 2, 200, 201, 941, 943, 204, 208, 404, or 903-909; (c) an amino acid sequence comprising at least one, two, or three, but no more than four different amino acids, relative to the amino acid sequence of any one of SEQ ID NOs: 2, 200, 201, 941, 943, 204, 208, 404, or 903-909; or (d) an amino acid sequence comprising at least one, two, or three but no more than four modifications, e.g., substitutions (e.g., conservative substitutions), relative to the amino acid sequence of any one of SEQ ID NOs: 2, 200, 201, 941, 943, 204, 208, 404, or 903-909. In some embodiments, the amino acid sequence is present in loop IV. In some embodiments, the amino acid sequence is present immediately subsequent to position 448, 452, 453, 455, relative to a reference sequence numbered according to the amino acid sequence of SEQ ID NO: 138.

[0014] In yet another aspect, the present disclosure provides an AAV particle comprising an AAV capsid variant and a nucleic acid comprising a transgene encoding an antibody molecule which binds to HER2/neu (e.g., human HER2/neu), wherein the AAV capsid variant comprises the amino acid sequence of SPH, wherein the amino acid sequence is present immediately subsequent to position 455, numbered according to the amino acid sequence of any one of SEQ ID NOs: 36-59, 138, 981, or 982.

[0015] In yet another aspect, present disclosure provides an AAV particle comprising an AAV capsid variant and a nucleic acid comprising a transgene encoding an antibody molecule which binds to HER2/neu (e.g., human HER2/neu), wherein the AAV capsid variant comprises the amino acid sequence of SPHSKA (SEQ ID NO: 941), wherein the amino acid sequence is present immediately subsequent to position 455, numbered according to the amino acid sequence of SEQ ID NO: 138.

[0016] In yet another aspect, present disclosure provides an AAV particle comprising an AAV capsid variant and a nucleic acid comprising a transgene encoding an antibody molecule which binds to HER2/neu (e.g., human HER2/neu), wherein the AAV capsid variant comprises the amino acid sequence of SPHSKA (SEQ ID NO: 941), wherein the amino acid sequence is present immediately subsequent to position 455, numbered according to the amino acid sequence of SEQ ID NO: 981.

[0017] In yet another aspect, present disclosure provides an AAV particle comprising an AAV capsid variant and a nucleic acid comprising a transgene encoding an antibody molecule which binds to HER2/neu (e.g., human HER2/neu), wherein the AAV capsid variant comprises the amino acid sequence of HDSPHK (SEQ ID NO: 2), wherein the amino acid sequence is present immediately subsequent to position 453, numbered according to the amino acid sequence of SEQ ID NO: 138.

[0018] In yet another aspect, present disclosure provides an AAV particle comprising an AAV capsid variant and a nucleic acid comprising a transgene encoding an antibody molecule which binds to HER2/neu (e.g., human HER2/neu), wherein the AAV capsid variant comprises the amino acid sequence of HDSPHK (SEQ ID NO: 2), wherein the amino acid sequence is present immediately subsequent to position 453, numbered according to the amino acid sequence of SEQ ID NO: 982.

[0019] In yet another aspect, present disclosure provides an AAV particle comprising an AAV capsid variant and a nucleic acid comprising a transgene encoding an antibody molecule which binds to HER2/neu (e.g., human HER2/neu), wherein the AAV capsid variant comprises an amino acid sequence comprising at least 3, 4, 5, or 6 consecutive amino acids from the amino acid sequence of SPHSKA (SEQ ID NO: 941), wherein: (i) the 3 consecutive amino acids comprise SPH; (ii) the 4 consecutive amino acids comprise SPHS (SEQ ID NO: 6616); (iii) the 5 consecutive amino acids comprise SPHSK (SEQ ID NO: 6617); or (iv) the 6 consecutive amino acids comprise SPHSKA (SEQ ID NO: 941); wherein the AAV capsid variant comprises: (a) a VP1 protein comprising the amino acid sequence of SEQ ID NO: 138 or SEQ ID NO: 981; (b) a VP2 protein comprising the amino acid sequence of positions 138-736 of SEQ ID NO: 138 or positions 138-742 of SEQ ID NO: 981; (c) a VP3 protein comprising the amino acid sequence of positions 203-736 of SEQ ID NO: 138 or positions 203-742 of SEQ ID NO: 981; or (d) an amino acid sequence with at least 90% (e.g., at least about 95, 96, 97, 98, or 99%) sequence identity to any of the amino acid sequences in (a)-(c). In some embodiments, the amino acid sequence is present immediately subsequent to positions 455, numbered according to SEQ ID NO: 138 or 981.

[0020] In yet another aspect, the present disclosure provides an AAV particle comprising an AAV capsid variant and a nucleic acid comprising a transgene encoding an antibody molecule which binds to HER2/neu (e.g., human HER2/neu), wherein the AAV capsid variant comprises one or two, but no more than three substitutions relative to the amino acid sequence of SPHSKA (SEQ ID NO: 941), wherein the AAV capsid variant comprises: (a) a VP1 protein comprising the amino acid sequence of SEQ ID NO: 138 or SEQ ID NO: 981; (b) a VP2 protein comprising the amino acid sequence of positions 138-736 of SEQ ID NO: 138 or positions 138-742 of SEQ ID NO: 981; (c) a VP3 protein comprising the amino acid sequence of positions 203-736 of SEQ ID NO: 138 or positions 203-742 of SEQ ID NO: 981; or (d) an amino acid sequence with at least 90% (e.g., at least about 95, 96, 97, 98, or 99%) sequence identity to any of the amino acid sequences in (a)-(c). In some embodiments, the amino acid sequence is present immediately subsequent to positions 455, numbered according to SEQ ID NO: 138 or 981.

[0021] In another aspect, the present disclosure provides an AAV particle comprising an AAV capsid variant and a nucleic acid comprising a transgene encoding an antibody molecule which binds to HER2/neu (e.g., human HER2/neu), wherein the AAV capsid variant comprises at least 3, 4, 5, or 6 consecutive amino acids from the amino acid sequence of HDSPHK (SEQ ID NO: 2), wherein: (i) the 3 consecutive amino acids comprise HDS; (ii) the 4 consecutive amino acids comprise HDSP (SEQ ID NO: 6618); (iii) the 5 consecutive amino acids comprise HDSPH (SEQ ID NO: 6619); and/or (iv) the 6 consecutive amino acids comprise HDSPHK (SEQ ID NO: 2); wherein the AAV capsid variant comprises: (a) a VP1 protein comprising the amino acid sequence of SEQ ID NO: 138 or SEQ ID NO: 982; (b) a VP2 protein comprising the amino acid sequence of positions 138-736 of SEQ ID NO: 138 or positions 138-742 of SEQ ID NO: 982; (c) a VP3 protein comprising the amino acid sequence of positions 203-736 of SEQ ID NO: 138 or positions 203-742 of SEQ ID NO: 982; or (d) an amino acid sequence with at least 90% (e.g., at least about 95, 96, 97, 98, or 99%) sequence identity to any of the amino acid sequences in (a)-(c). In some embodiments, the amino acid sequence is present immediately subsequent to positions 453, numbered according to SEQ ID NO: 138 or 982.

[0022] In another aspect, the present disclosure provides an AAV particle comprising an AAV capsid variant and a nucleic acid comprising a transgene encoding an antibody molecule which binds to HER2/neu (e.g., human HER2/neu), wherein the AAV capsid variant comprises one or two, but no more than three substitutions relative to the amino acid sequence of HDSPHK (SEQ ID NO: 2), wherein the AAV capsid variant comprises: (a) a VP1 protein comprising the amino acid sequence of SEQ ID NO: 138 or SEQ ID NO: 982; (b) a VP2 protein comprising the amino acid sequence of positions 138-736 of SEQ ID NO: 138 or positions 138-742 of SEQ ID NO: 982; (c) a VP3 protein comprising the amino acid sequence of positions 203-736 of SEQ ID NO: 138 or positions 203-742 of SEQ ID NO: 982; or (d) an amino acid sequence with at least 90% (e.g., at least about 95, 96, 97, 98, or 99%) sequence identity to any of the amino acid sequences in (a)-(c). In some embodiments, the amino acid sequence is present immediately subsequent to positions 453, numbered according to SEQ ID NO: 138 or 982.

[0023] Accordingly, in one aspect, the present disclosure provides an isolated, e.g., recombinant nucleic acid comprising a transgene encoding an antibody molecule that binds to HER2, which comprises a heavy chain variable region (VH) encoded by a nucleotide sequence comprising a nucleotide sequence with at least 80% (e.g., at least about 85, 90, 95, 96, 97, 98, or 99%) sequence identity to the nucleotide sequence of SEQ ID NO: 5109 and/or a light chain variable region (VL) encoded by a nucleotide sequence comprising a nucleotide sequence with at least 80% (e.g., at least about 85, 90, 95, 96, 97, 98, or 99%) sequence identity to the nucleotide sequence of SEQ ID NO: 5113.

[0024] Accordingly, in one aspect, the present disclosure provides an isolated, e.g., recombinant nucleic acid comprising a transgene encoding an antibody molecule that binds to HER2, which comprises a heavy chain variable region (VH) encoded by a nucleotide sequence comprising a nucleotide sequence with at least 80% (e.g., at least about 85, 90, 95, 96, 97, 98, or 99%) sequence identity to the nucleotide sequence of SEQ ID NO: 5269 and/or a light chain variable region (VL) encoded by a nucleotide sequence comprising a nucleotide sequence with at least 80% (e.g., at least about 85, 90, 95, 96, 97, 98, or 99%) sequence identity to the nucleotide sequence of SEQ ID NO: 5273.

[0025] In another aspect, the present disclosure provides a genetic element comprising a promoter operably linked to a transgene encoding an antibody molecule that binds to HER2 (e.g., an anti-HER2 antibody molecule described herein), wherein the transgene is encoded by an isolated nucleic acid molecule described herein. In some embodiments, the genetic element further comprises an internal terminal repeat (ITR) sequence (e.g., an ITR region described herein), an enhancer (e.g., an enhancer described herein), an intron region (e.g., an intron region described herein) and/or an exon region (e.g., an exon region described herein), and/or a poly A signal region (e.g., a poly A signal sequence described herein). In some embodiments, the genetic element comprises the nucleotide sequence of any one of SEQ ID NOs: 5163, 5170, 5164, 5165, 5166, 5185, 5186, 5167, 5168, 5187, 5188, 5619, 5189, 5190, 5343, 5374, 5375, 6500, 6501, 6502, 6503, 6504, 6505, 6506, 6507, 6508, or 6509, or a sequence with at least 95% sequence identity thereto.

[0026] In yet another aspect, the present disclosure provides an isolated, e.g., recombinant, genetic element comprising a nucleic acid positioned between two inverted terminal repeats (ITRs), wherein the nucleic acid comprising a transgene encoding a multispecific, e.g., bispecific, antibody molecule comprising at least two antigen binding domains for two different domains of HER2. In some embodiments, the first antigen binding domain binds to domain I of HER2, and the second antigen binding domain binds to domain IV of HER2.

[0027] In yet another aspect, the present disclosure provides an isolated, e.g., recombinant, adeno-associated viral (AAV) vector comprising a transgene encoding an antibody molecule that binds to HER2 described herein. In some embodiments, the AAV vector comprises a genetic element comprising a promoter operably linked to a transgene encoding an antibody molecule that binds to HER2 described herein.

[0028] In yet another aspect, the present disclosure provides an isolated, e.g., recombinant, AAV particle comprising an AAV capsid polypeptide, e.g., an AAV capsid variant, and a nucleic acid comprising a transgene encoding an antibody molecule that binds to HER2 described herein. In some embodiments, the AAV particle comprises a genetic element comprising a promoter operably linked to a transgene encoding an antibody molecule that binds to HER2 described herein. In some embodiments, the AAV particle comprises an AAV vector described herein. In some embodiments, the AAV capsid polypeptide, comprises a VOY101 capsid polypeptide, a VOY9P39 capsid polypeptide, a VOY9P33 capsid protein, a AAVPHP.B (PHP.B) capsid polypeptide, a AAVPHP.N (PHP.N) capsid polypeptide, an AAV1 capsid polypeptide, an AAV2 capsid polypeptide, an AAV5 capsid polypeptide, an AAV9 capsid polypeptide, an AAV9 K449R capsid polypeptide, an AAVrh10 capsid polypeptide, or a functional variant thereof.

[0029] In yet another aspect, the present disclosure provides a method of making a genetic element. The method comprising providing a nucleic acid encoding a genetic element described herein and a backbone region suitable for replication of the genetic element in a cell, e.g., a bacterial cell (e.g., wherein the backbone region comprises one or both of a bacterial origin of replication and a selectable marker), and excising the genetic element from the backbone region, e.g., by cleaving the nucleic acid molecule at upstream and downstream of the genetic element.

[0030] In yet another aspect, the present disclosure provides a method of making an isolated, e.g., recombinant AAV particle. The method comprising providing a host cell comprising a genetic element described herein and incubating the host cell under conditions suitable to enclose the genetic element in the AAV particle, e.g., a VOY101 capsid protein, thereby making the isolated AAV particle.

[0031] In yet another aspect, the present disclosure provides method of delivering an exogenous antibody molecule that binds to HER2 (e.g., an anti-HER2 antibody molecule described herein), to a subject. The method comprising administering an effective amount of an AAV particle or a plurality of AAV particles, described herein, said AAV particle comprising an AAV vector and/or genetic element described herein.

[0032] In yet another aspect, the present disclosure provides a method of treating a subject having or being diagnosed as having disease and/or a disorder associated with over-expression of HER2. The method comprising administering to the subject an effective amount of an AAV particle or a plurality of AAV particles, described herein, comprising an AAV vector and/or genetic element described herein. In some embodiments, the disease and/or disorder associated with over-expression of HER2 includes tumors, cancers, and neoplastic tissue, along with pre-malignant and non-neoplastic or non-malignant hyperproliferative disorders.

[0033] Those skilled in the art will recognize or be able to ascertain using no more than routine experimentation, many equivalents to the specific embodiments of the invention described herein. Such equivalents are intended to be encompassed by the following enumerated embodiments.

### ENUMERATED EMBODIMENTS

1. An AAV particle comprising an AAV capsid variant and a nucleic acid comprising a transgene encoding an antibody molecule which binds to HER2/neu (e.g., human HER2/neu), wherein the AAV capsid variant comprises an amino acid sequence having the following formula: [N1]-[N2]-[N3], wherein:
[0034] (i) optionally [N1] comprises X1, X2, and X3, wherein at least one of X1, X2, or X3 is G;
[0035] (ii) [N2] comprises the amino acid sequence of SPH;
[0036] (ii) [N3] comprises X4, X5, and X6, wherein at least one of X4, X5, or X6 is a basic amino acid, e.g., a K or R.
   2. The AAV particle of embodiment 1, wherein X4, X5, or both of [N3] is a K.
   3. The AAV particle of embodiment 1 or 2, wherein X4, X5, or X6 of [N3] is an R.
   4. The AAV particle of any one of embodiments 1-3, wherein:
[0037] (a) position X4 of [N3] is: K, S, A, V, T, G, F, W, V, N, or R;
[0038] (b) position X5 of [N3] is: S, K, T, F, I, L, Y, H, M, or R; and/or
[0039] (c) position X6 of [N3] is: G, A, R, M, I, N, T, Y, D, P, V, L, E, W, N, Q, K, or S;
[0040] optionally wherein the AAV capsid variant comprises an amino acid modification, e.g., a conservative substitution, of any of the aforesaid amino acids in (a)-(c).
   5. The AAV particle of any one of embodiments 1-4, wherein [N3] comprises SK, KA, KS, AR, RM, VK, AS, SR, VK, KR, KK, KN, VR, RS, RK, KT, TS, KF, FG, KI, IG, KL, LG, TT, TY, KY, YG, KD, KP, TR, RG, VR, GA, SL, SS, FL, WK, SA, RA, LR, KW, RR, GK, TK, NK, AK, KV, KG, KH, KM, TG, SE, SV, SW, SN, HG, SQ, LW, MG, MA, or SG.
   6. The AAV particle of any one of embodiments 1-5, wherein [N3] is or comprises SKA, KSG, ARM, VKS, ASR, VKI, KKN, VRM, RKA, KTS, KFG, KIG, KLG, KTT, KTY, KYG, SKD, SKP, TRG, VRG, KRG, GAR, KSA, KSR, SKL, SRA, SKR, SLR, SRG, SSR, FLR, SKW, SKS, WKA, VRR, SKV, SKT, SKG, GKA, TKA, NKA, SKL, SKN, AKA, KTG, KSL, KSE, KSV, KSW, KSN, KHG, KSQ, KSK, KLW, WKG, KMG, KMA, or RSG.
   7. The AAV particle of any one of embodiments 1-6, wherein [N2]-[N3] comprises SPHSK (SEQ ID NO: 6617), SPHKS (SEQ ID NO: 6620), SPHAR (SEQ ID NO: 6621), SPHVK (SEQ ID NO: 6622), SPHAS (SEQ ID NO: 6623), SPHKK (SEQ ID NO: 6624), SPHVR (SEQ ID NO: 6625), SPHRK (SEQ ID NO: 6626), SPHKT (SEQ ID NO: 6627), SPHKF (SEQ ID NO: 6628), SPHKI (SEQ ID NO: 6629), SPHKL (SEQ ID NO: 6630), SPHKY (SEQ ID NO: 6631), SPHTR (SEQ ID NO: 6632), SPHKR (SEQ ID NO: 6633), SPHGA (SEQ ID NO: 6634), SPHSR (SEQ ID NO: 6635), SPHSL (SEQ ID NO: 6636), SPHSS (SEQ ID NO: 6637), SPHFL (SEQ ID NO: 6638), SPHWK (SEQ ID NO: 6639), SPHGK (SEQ ID NO: 6640), SPHTK (SEQ ID NO: 6641), SPHNK (SEQ ID NO: 6642), SPHAK (SEQ ID NO: 6643), SPHKH (SEQ ID NO: 6644), SPHKM (SEQ ID NO: 6645), or SPHRS (SEQ ID NO: 6646).
   8. The AAV particle of any one of embodiments 1-7, wherein [N2]-[N3] is or comprises:

(i)
(SEQ ID NO: 941)
SPHSKA,
(SEQ ID NO: 946)
SPHKSG,
(SEQ ID NO: 947)
SPHARM,
(SEQ ID NO: 948)
SPHVKS,
(SEQ ID NO: 949)
SPHASR,
(SEQ ID NO: 950)
SPHVKI,
(SEQ ID NO: 954)
SPHKKN,
(SEQ ID NO: 955)
SPHVRM,
(SEQ ID NO: 956)
SPHRKA,
(SEQ ID NO: 957)
SPHKFG,
(SEQ ID NO: 958)
SPHKIG,
(SEQ ID NO: 959)
SPHKLG,
(SEQ ID NO: 963)
SPHKTS,
(SEQ ID NO: 964)
SPHKTT,
(SEQ ID NO: 965)
SPHKTY,
(SEQ ID NO: 966)
SPHKYG,
(SEQ ID NO: 967)
SPHSKD,
(SEQ ID NO: 968)
SPHSKP,
(SEQ ID NO: 972)
SPHTRG,
(SEQ ID NO: 973)
SPHVRG,
(SEQ ID NO: 974)
SPHKRG,
(SEQ ID NO: 975)
SPHGAR,
(SEQ ID NO: 977)
SPHKSA,
(SEQ ID NO: 951)
SPHKSR,
(SEQ ID NO: 960)
SPHSKL,
(SEQ ID NO: 969)
SPHSRA,
(SEQ ID NO: 978)
SPHSKR,
(SEQ ID NO: 952)
SPHSLR,
(SEQ ID NO: 961)
SPHSRG,
(SEQ ID NO: 970)
SPHSSR,
(SEQ ID NO: 979)
SPHFLR,
(SEQ ID NO: 953)
SPHSKW,
(SEQ ID NO: 962)
SPHSKS,
(SEQ ID NO: 971)
SPHWKA,
(SEQ ID NO: 980)
SPHVRR,
(SEQ ID NO: 6647)
SPHSKT,
(SEQ ID NO: 6648)
SPHSKG,
(SEQ ID NO: 6649)
SPHGKA,
(SEQ ID NO: 6650)
SPHNKA,
(SEQ ID NO: 6651)
SPHSKN,
(SEQ ID NO: 6652)
SPHAKA,
(SEQ ID NO: 6653)
SPHSKV,
(SEQ ID NO: 6654)
SPHKTG,
(SEQ ID NO: 6655)
SPHTKA,
(SEQ ID NO: 6656)
SPHKSL,
(SEQ ID NO: 6657)
SPHKSE,
(SEQ ID NO: 6658)
SPHKSV,
(SEQ ID NO: 6659)
SPHKSW,
(SEQ ID NO: 6660)
SPHKSN,
(SEQ ID NO: 6661)
SPHKHG,
(SEQ ID NO: 6662)
SPHKSQ,
(SEQ ID NO: 6663)
SPHKSK,
(SEQ ID NO: 6664)
SPHKLW,
(SEQ ID NO: 6665)
SPHWKG,
(SEQ ID NO: 6666)
SPHKMG,
(SEQ ID NO: 6667)
SPHKMA,
or
(SEQ ID NO: 976)
SPHRSG;

[0041] (ii) an amino acid sequence comprising any portion of an amino acid sequence in (i), e.g., any 2, 3, 4, or 5 amino acids, e.g., consecutive amino acids, thereof;
[0042] (iii) an amino acid sequence comprising one, two, or three but no more than four modifications, e.g., substitutions (e.g., conservative substitutions), insertions, or deletions, relative to any of the amino acid sequences in (i); or
[0043] (iv) an amino acid sequence comprising one, two, or three but no more than four different amino acids, relative to any one of the amino acid sequences in (i).
   9. The AAV particle of any one of embodiments 1-8, wherein the AAV capsid variant comprises an amino acid other than G at position 453 (e.g., V, R, D, E, M, T, I, S, A, N, L, K, H, P, W, or C), an amino acid other than S at position 454 (V, L, N, D, H, R, P, G, T, I, A, E, Y, M, or Q), and/or a G at position 455 (e.g., C, L, D, E, Y, H, V, A, N, P, or S), numbered according to any one of SEQ ID NOs: 36-59, 138, 981 or 982.
   10. The AAV particle of any one of embodiments 1-8, wherein the AAV capsid variant comprises the amino acid G at position 453, the amino acid S at position 454, and the amino acid G at position 455, numbered according to SEQ ID NO: 138 or 981.
   11. The AAV particle of any one of embodiments 1-9, wherein the AAV capsid variant comprises the amino acid G at position 453, the amino acid H at position 454, and the amino acid D at position 455, numbered according to SEQ ID NO: 138 or 982.
   12. The AAV particle of any one of embodiments 1-11, wherein [N1] comprises X1. X2, and X3, wherein at least one of X1, X2, or X3 is G.
   13. The AAV particle of any one of embodiments 1-12, wherein:
[0044] (a) position X1 of [N1] is: G, V, R, D, E, M, T, I, S, A, N, L, K, H, P, W, or C;
[0045] (b) position X2 of [N1] is: S, V, L, N, D, H, R, P, G, T, I, A, E, Y, M, or Q; and/or
[0046] (c) position X3 of [N1] is: G, C, L, D, E, Y, H, V, A, N, P, or S;
[0047] optionally wherein the AAV capsid variant comprises an amino acid modification, e.g., a conservative substitution, of any of the aforesaid amino acids in (a)-(c).
   14. The AAV particle of any one of embodiments 1-13, wherein [N1] comprises GS, SG, GH, HD, GQ, QD, VS, CS, GR, RG, QS, SH, MS, RN, TS, IS, GP, ES, SS, GN, AS, NS, LS, GG, KS, GT, PS, RS, GI, WS, DS, ID, GL, DA, DG, ME, EN, KN, KE, AI, NG, PG, TG, SV, IG, LG, AG, EG, SA, YD, HE, HG, RD, ND, PD, MG, QV, DD, HN, HP, GY, GM, GD, or HS.
   15. The AAV particle of any one of embodiments 1-14, wherein [N1] is or comprises GSG, GHD, GQD, VSG, CSG, GRG, CSH, GQS, GSH, RVG, GSC, GLL, GDD, GHE, GNY, MSG, RNG, TSG, ISG, GPG, ESG, SSG, GNG, ASG, NSG, LSG, GGG, KSG, HSG, GTG, PSG, GSV, RSG, GIG, WSG, DSG, IDG, GLG, DAG, DGG, MEG, ENG, GSA, KNG, KEG, AITG, GYD, GHG, GRD, GND, GPD, GMG, GQV, GHN, GHP, or GHS.
   16. The AAV particle of any one of embodiments 1-15, wherein [N1]-[N2] comprises

(i)
(SEQ ID NO: 6668)
SGSPH,
(SEQ ID NO: 6619)
HDSPH,
(SEQ ID NO: 6669)
QDSPH,
(SEQ ID NO: 6670)
RGSPH,
(SEQ ID NO: 6671)
SHSPH,
(SEQ ID NO: 6672)
QSSPH,
(SEQ ID NO: 6673)
DDSPH,
(SEQ ID NO: 6674)
HESPH,
(SEQ ID NO: 6675)
NYSPH,
(SEQ ID NO: 6676)
VGSPH,
(SEQ ID NO: 6677)
SCSPH,
(SEQ ID NO: 6678)
LLSPH,
(SEQ ID NO: 6679)
NGSPH,
(SEQ ID NO: 6680)
PGSPH,
(SEQ ID NO: 6681)
GGSPH,
(SEQ ID NO: 6682)
TGSPH,
(SEQ ID NO: 6683)
SVSPH,
(SEQ ID NO: 6684)
IGSPH,
(SEQ ID NO: 6685)
DGSPH,
(SEQ ID NO: 6686)
LGSPH,
(SEQ ID NO: 6687)
AGSPH,
(SEQ ID NO: 6688)
EGSPH,
(SEQ ID NO: 6689)
SASPH,
(SEQ ID NO: 6690)
YDSPH,
(SEQ ID NO: 6691)
HGSPH,
(SEQ ID NO: 6692)
RDSPH,
(SEQ ID NO: 6693)
NDSPH,
(SEQ ID NO: 6694)
PDSPH,
(SEQ ID NO: 6695)
MGSPH,
(SEQ ID NO: 6696)
QVSPH,
(SEQ ID NO: 6697)
HNSPH,
(SEQ ID NO: 6698)
HPSPH,
or
(SEQ ID NO: 6699)
HSSPH;

[0048] (ii) an amino acid sequence comprising any portion of an amino acid sequence in (i), e.g., any 2, 3, or 4 amino acids, e.g., consecutive amino acids, thereof;
[0049] (iii) an amino acid sequence comprising one, two, or three but no more than four modifications, e.g., substitutions (e.g., conservative substitutions), insertions, or deletions, relative to any of the amino acid sequences in (i); or
[0050] (iv) an amino acid sequence comprising one, two, or three but no more than four different amino acids, relative to any one of the amino acid sequences in (i).
   17. The AAV article of an one of embodiments 1-16, wherein N1-N2 is or comprises:

(i)
(SEQ ID NO: 6700)
GSGSPH,
(SEQ ID NO: 6701)
GHDSPH,
(SEQ ID NO: 6702)
GQDSPH,
(SEQ ID NO: 6703)
VSGSPH,
(SEQ ID NO: 6704)
CSGSPH,
(SEQ ID NO: 6705)
GRGSPH,
(SEQ ID NO: 6706)
CSHSPH,
(SEQ ID NO: 6707)
GQSSPH,
(SEQ ID NO: 6708)
GSHSPH,
(SEQ ID NO: 6709)
GDDSPH,
(SEQ ID NO: 6710)
GHESPH,
(SEQ ID NO: 6711)
GNYSPH,
(SEQ ID NO: 6712)
RVGSPH,
(SEQ ID NO: 6713)
GSCSPH,
(SEQ ID NO: 6714)
GLLSPH,
(SEQ ID NO: 6715)
MSGSPH,
(SEQ ID NO: 6716)
RNGSPH,
(SEQ ID NO: 6717)
TSGSPH,
(SEQ ID NO: 6718)
ISGSPH,
(SEQ ID NO: 6719)
GPGSPH,
(SEQ ID NO: 6720)
ESGSPH,
(SEQ ID NO: 6721)
SSGSPH,
(SEQ ID NO: 6722)
GNGSPH,
(SEQ ID NO: 6723)
ASGSPH,
(SEQ ID NO: 6724)
NSGSPH,
(SEQ ID NO: 6725)
LSGSPH,
(SEQ ID NO: 6726)
GGGSPH,
(SEQ ID NO: 6727)
KSGSPH,
(SEQ ID NO: 6728)
HSGSPH,
(SEQ ID NO: 6729)
GTGSPH,
(SEQ ID NO: 6730)
PSGSPH,
(SEQ ID NO: 6731)
GSVSPH,
(SEQ ID NO: 6732)
RSGSPH,
(SEQ ID NO: 6733)
GIGSPH,
(SEQ ID NO: 6734)
WSGSPH,
(SEQ ID NO: 6735)
DSGSPH,
(SEQ ID NO: 6736)
IDGSPH,
(SEQ ID NO: 6737)
GLGSPH,
(SEQ ID NO: 6738)
DAGSPH,
(SEQ ID NO: 6739)
DGGSPH,
(SEQ ID NO: 6740)
MEGSPH,
(SEQ ID NO: 6741)
ENGSPH,
(SEQ ID NO: 6742)
GSASPH,
(SEQ ID NO: 6743)
KNGSPH,
(SEQ ID NO: 6744)
KEGSPH,
(SEQ ID NO: 6745)
AIGSPH,
(SEQ ID NO: 6746)
GYDSPH,
(SEQ ID NO: 6747)
GHGSPH,
(SEQ ID NO: 6748)
GRDSPH,
(SEQ ID NO: 6749)
GNDSPH,
(SEQ ID NO: 6750)
GPDSPH,
(SEQ ID NO: 6751)
GMGSPH,
(SEQ ID NO: 6752)
GQVSPH,
(SEQ ID NO: 6753)
GHNSPH,
(SEQ ID NO: 6754)
GHPSPH,
or
(SEQ ID NO: 6755)
GHSSPH;

[0051] (ii) an amino acid sequence comprising any portion of an amino acid sequence in (i), e.g., any 2, 3, 4, or 5 amino acids, e.g., consecutive amino acids, thereof;
[0052] (iii) an amino acid sequence comprising one, two, or three but no more than four modifications, e.g., substitutions (e.g., conservative substitutions), insertions, or deletions, relative to any of the amino acid sequences in (i); or
[0053] (iv) an amino acid sequence comprising one, two, or three but no more than four different amino acids, relative to any one of the amino acid sequences in (i).
   18. The AAV particle of any one of embodiments 1-17, wherein [N1]-[N2]-[N3] comprises:

(i)
(SEQ ID NO: 6756)
SGSPHSK,
(SEQ ID NO: 6757)
HDSPHKS,
(SEQ ID NO: 6758)
SGSPHAR,
(SEQ ID NO: 6759)
SGSPHVK,
(SEQ ID NO: 6760)
QDSPHKS,
(SEQ ID NO: 6761)
SGSPHKK,
(SEQ ID NO: 6762)
SGSPHVR,
(SEQ ID NO: 6763)
SGSPHAS,
(SEQ ID NO: 6764)
SGSPHRK,
(SEQ ID NO: 6765)
SGSPHKT,
(SEQ ID NO: 6766)
SHSPHKS,
(SEQ ID NO: 6767)
QSSPHRS,
(SEQ ID NO: 6768)
RGSPHAS,
(SEQ ID NO: 6769)
RGSPHSK,
(SEQ ID NO: 6770)
SGSPHKF,
(SEQ ID NO: 6771)
SGSPHKI,
(SEQ ID NO: 6772)
SGSPHKL,
(SEQ ID NO: 6773)
SGSPHKY,
(SEQ ID NO: 6774)
SGSPHTR,
(SEQ ID NO: 6775)
SHSPHKR,
(SEQ ID NO: 6776)
SGSPHGA,
(SEQ ID NO: 6777)
HDSPHKR,
(SEQ ID NO: 6778)
DDSPHKS,
(SEQ ID NO: 6779)
HESPHKS,
(SEQ ID NO: 6780)
NYSPHKI,
(SEQ ID NO: 6781)
SGSPHSR,
(SEQ ID NO: 6782)
SGSPHSL,
(SEQ ID NO: 6783)
SGSPHSS,
(SEQ ID NO: 6784)
VGSPHSK,
(SEQ ID NO: 6785)
SCSPHRK,
(SEQ ID NO: 6786)
SGSPHFL,
(SEQ ID NO: 6787)
LLSPHWK,
(SEQ ID NO: 6788)
NGSPHSK,
(SEQ ID NO: 6789)
PGSPHSK,
(SEQ ID NO: 6790)
GGSPHSK,
(SEQ ID NO: 6791)
TGSPHSK,
(SEQ ID NO: 6792)
SVSPHGK,
(SEQ ID NO: 6793)
SGSPHTK,
(SEQ ID NO: 6794)
IGSPHSK,
(SEQ ID NO: 6795)
DGSPHSK,
(SEQ ID NO: 6796)
SGSPHNK,
(SEQ ID NO: 6797)
LGSPHSK,
(SEQ ID NO: 6798)
AGSPHSK,
(SEQ ID NO: 6799)
EGSPHSK,
(SEQ ID NO: 6800)
SASPHSK,
(SEQ ID NO: 6801)
SGSPHAK,
(SEQ ID NO: 6802)
HDSPHKI,
(SEQ ID NO: 6803)
YDSPHKS,
(SEQ ID NO: 6804)
HDSPHKT,
(SEQ ID NO: 6805)
RGSPHKR,
(SEQ ID NO: 6806)
HGSPHSK,
(SEQ ID NO: 6807)
RDSPHKS,
(SEQ ID NO: 6808)
NDSPHKS,
(SEQ ID NO: 6809)
QDSPHKI,
(SEQ ID NO: 6810)
PDSPHKI,
(SEQ ID NO: 6811)
PDSPHKS,
(SEQ ID NO: 6812)
MGSPHSK,
(SEQ ID NO: 6813)
HDSPHKH,
(SEQ ID NO: 6814)
QVSPHKS,
(SEQ ID NO: 6815)
HNSPHKS,
(SEQ ID NO: 6816)
NGSPHKR,
(SEQ ID NO: 6817)
HDSPHKY,
(SEQ ID NO: 6818)
NDSPHKI,
(SEQ ID NO: 6819)
HDSPHKL,
(SEQ ID NO: 6820)
HPSPHWK,
(SEQ ID NO: 6821)
HDSPHKM,
or
(SEQ ID NO: 6822)
HSSPHRS;

[0054] (ii) an amino acid sequence comprising any portion of an amino acid sequence in (i), e.g., any 2, 3, 4, 5, or 6 amino acids, e.g., consecutive amino acids, thereof;
[0055] (iii) an amino acid sequence comprising one, two, or three but no more than four modifications, e.g., substitutions (e.g., conservative substitutions), insertions, or deletions, relative to any of the amino acid sequences in (i); or
[0056] (iv) an amino acid sequence comprising one, two, or three but no more than four different amino acids, relative to any one of the amino acid sequences in (i).
   19. The AAV particle of any one of embodiments 1-18, wherein [N1]-[N2]-[N3] is or comprises:

(i)
(SEQ ID NO: 6613)
GSGSPHSKA,
(SEQ ID NO: 6615)
GHDSPHKSG,
(SEQ ID NO: 6823)
GSGSPHARM,
(SEQ ID NO: 6824)
GSGSPHVKS,
(SEQ ID NO: 6825)
GQDSPHKSG,
(SEQ ID NO: 6826)
GSGSPHASR,
(SEQ ID NO: 6827)
GSGSPHVKI,
(SEQ ID NO: 6828)
GSGSPHKKN,
(SEQ ID NO: 6829)
GSGSPHVRM,
(SEQ ID NO: 6830)
VSGSPHSKA,
(SEQ ID NO: 6831)
CSGSPHSKA,
(SEQ ID NO: 6832)
GSGSPHRKA,
(SEQ ID NO: 6833)
CSGSPHKTS,
(SEQ ID NO: 6834)
CSHSPHKSG,
(SEQ ID NO: 6835)
GQSSPHRSG,
(SEQ ID NO: 6836)
GRGSPHASR,
(SEQ ID NO: 6837)
GRGSPHSKA,
(SEQ ID NO: 6838)
GSGSPHKFG,
(SEQ ID NO: 6839)
GSGSPHKIG,
(SEQ ID NO: 6840)
GSGSPHKLG,
(SEQ ID NO: 6841)
GSGSPHKTS,
(SEQ ID NO: 6842)
GSGSPHKTT,
(SEQ ID NO: 6843)
GSGSPHKTY,
(SEQ ID NO: 6844)
GSGSPHKYG,
(SEQ ID NO: 6845)
GSGSPHSKD,
(SEQ ID NO: 6846)
GSGSPHSKP,
(SEQ ID NO: 6847)
GSGSPHTRG,
(SEQ ID NO: 6848)
GSGSPHVRG,
(SEQ ID NO: 6849)
GSHSPHKRG,
(SEQ ID NO: 6850)
GSHSPHKSG,
(SEQ ID NO: 6851)
VSGSPHASR,
(SEQ ID NO: 6852)
VSGSPHGAR,
(SEQ ID NO: 6853)
VSGSPHKFG,
(SEQ ID NO: 6854)
GHDSPHKRG,
(SEQ ID NO: 6855)
GDDSPHKSG,
(SEQ ID NO: 6856)
GHESPHKSA,
(SEQ ID NO: 6857)
GHDSPHKSA,
(SEQ ID NO: 6858)
GNYSPHKIG,
(SEQ ID NO: 6859)
GHDSPHKSR,
(SEQ ID NO: 6860)
GSGSPHSKL,
(SEQ ID NO: 6861)
GSGSPHSRA,
(SEQ ID NO: 6862)
GSGSPHSKR,
(SEQ ID NO: 6863)
GSGSPHSLR,
(SEQ ID NO: 6864)
GSGSPHSRG,
(SEQ ID NO: 6865)
GSGSPHSSR,
(SEQ ID NO: 6866)
RVGSPHSKA,
(SEQ ID NO: 6867)
GSCSPHRKA,
(SEQ ID NO: 6868)
GSGSPHFLR,
(SEQ ID NO: 6869)
GSGSPHSKW,
(SEQ ID NO: 6870)
GSGSPHSKS,
(SEQ ID NO: 6871)
GLLSPHWKA,
(SEQ ID NO: 6872)
GSGSPHVRR,
(SEQ ID NO: 6873)
GSGSPHSKV,
(SEQ ID NO: 6874)
MSGSPHSKA,
(SEQ ID NO: 6875)
RNGSPHSKA,
(SEQ ID NO: 6876)
TSGSPHSKA,
(SEQ ID NO: 6877)
ISGSPHSKA,
(SEQ ID NO: 6878)
GPGSPHSKA,
(SEQ ID NO: 6879)
GSGSPHSKT,
(SEQ ID NO: 6880)
ESGSPHSKA,
(SEQ ID NO: 6881)
SSGSPHSKA,
(SEQ ID NO: 6882)
GNGSPHSKA,
(SEQ ID NO: 6883)
ASGSPHSKA,
(SEQ ID NO: 6884)
NSGSPHSKA,
(SEQ ID NO: 6885)
LSGSPHSKA,
(SEQ ID NO: 6886)
GGGSPHSKA,
(SEQ ID NO: 6887)
KSGSPHSKA,
(SEQ ID NO: 6888)
GGGSPHSKS,
(SEQ ID NO: 6889)
GSGSPHSKG,
(SEQ ID NO: 6890)
HSGSPHSKA,
(SEQ ID NO: 6891)
GTGSPHSKA,
(SEQ ID NO: 6892)
PSGSPHSKA,
(SEQ ID NO: 6893)
GSVSPHGKA,
(SEQ ID NO: 6894)
RSGSPHSKA,
(SEQ ID NO: 6895)
GSGSPHTKA,
(SEQ ID NO: 6896)
GIGSPHSKA,
(SEQ ID NO: 6897)
WSGSPHSKA,
(SEQ ID NO: 6898)
DSGSPHSKA,
(SEQ ID NO: 6899)
IDGSPHSKA,
(SEQ ID NO: 6900)
GSGSPHNKA,
(SEQ ID NO: 6901)
GLGSPHSKS,
(SEQ ID NO: 6902)
DAGSPHSKA,
(SEQ ID NO: 6903)
DGGSPHSKA,
(SEQ ID NO: 6904)
MEGSPHSKA,
(SEQ ID NO: 6905)
ENGSPHSKA,
(SEQ ID NO: 6906)
GSASPHSKA,
(SEQ ID NO: 6907)
GNGSPHSKS,
(SEQ ID NO: 6908)
KNGSPHSKA,
(SEQ ID NO: 6909)
KEGSPHSKA,
(SEQ ID NO: 6910)
AIGSPHSKA,
(SEQ ID NO: 6911)
GSGSPHSKN,
(SEQ ID NO: 6912)
GSGSPHAKA,
(SEQ ID NO: 6913)
GHDSPHKIG,
(SEQ ID NO: 6914)
GYDSPHKSG,
(SEQ ID NO: 6915)
GHESPHKSG,
(SEQ ID NO: 6916)
GHDSPHKTG,
(SEQ ID NO: 6917)
GRGSPHKRG,
(SEQ ID NO: 6825)
GQDSPHKSG,
(SEQ ID NO: 6918)
GHDSPHKSL,
(SEQ ID NO: 6919)
GHGSPHSKA,
(SEQ ID NO: 6920)
GHDSPHKSE,
(SEQ ID NO: 6830)
VSGSPHSKA,
(SEQ ID NO: 6921)
GRDSPHKSG,
(SEQ ID NO: 6922)
GNDSPHKSV,
(SEQ ID NO: 6923)
GQDSPHKIG,
(SEQ ID NO: 6924)
GHDSPHKSV,
(SEQ ID NO: 6925)
GPDSPHKIG,
(SEQ ID NO: 6926)
GPDSPHKSG,
(SEQ ID NO: 6927)
GHDSPHKSW,
(SEQ ID NO: 6928)
GHDSPHKSN,
(SEQ ID NO: 6929)
GMGSPHSKT,
(SEQ ID NO: 6930)
GHDSPHKHG,
(SEQ ID NO: 6931)
GQVSPHKSG,
(SEQ ID NO: 6932)
GDDSPHKSV,
(SEQ ID NO: 6933)
GHNSPHKSG,
(SEQ ID NO: 6934)
GNGSPHKRG,
(SEQ ID NO: 6935)
GHDSPHKYG,
(SEQ ID NO: 6936)
GHDSPHKSQ,
(SEQ ID NO: 6937)
GNDSPHKIG,
(SEQ ID NO: 6938)
GHDSPHKSK,
(SEQ ID NO: 6939)
GHDSPHKLW,
(SEQ ID NO: 6940)
GHPSPHWKG,
(SEQ ID NO: 6941)
GHDSPHKMG,
(SEQ ID NO: 6942)
GHDSPHKMA,
or
(SEQ ID NO: 6943)
GHSSPHRSG;

[0057] (ii) an amino acid sequence comprising any portion of an amino acid sequence in (i), e.g., any 2, 3, 4, 5, 6, 7, or 8 amino acids. e.g., consecutive amino acids, thereof;
[0058] (iii) an amino acid sequence comprising one, two, or three but no more than four modifications, e.g., substitutions (e.g., conservative substitutions), insertions, or deletions, relative to any of the amino acid sequences in (i); or
[0059] (iv) an amino acid sequence comprising one, two, or three but no more than four different amino acids, relative to any one of the amino acid sequences in (i).
   20. The AAV particle of any one of embodiments 1-19, wherein [N3] comprises SK, KA, KS, or SG.
   21. The AAV particle of any one of embodiments 1-20, wherein [N3] is or comprises SKA, KSG, or KYG.
   22. The AAV particle of any one of embodiments 1-21, wherein [N2]-[N3] comprises SPHSK (SEQ ID NO: 6617), SPHKS (SEQ ID NO: 6620), or SPHKY (SEQ ID NO: 6631).
   23. The AAV particle of any one of embodiments 1-22, wherein [N2]-[N3] is or comprises SPHSKA (SEQ ID NO: 941).
   24. The AAV particle of any one of embodiments 1-22, wherein [N2]-[N3] is or comprises SPHKSG (SEQ ID NO: 946).
   25. The AAV particle of any one of embodiments 1-22, wherein [N2]-[N3] is or comprises SPHKYG (SEQ ID NO: 966).
   26. The AAV particle of any one of embodiments 1-25, wherein [N1] comprises GS, SG, GH, or HD.
   27. The AAV particle of any one of embodiments 1-26, wherein [N1] is or comprises GSG.
   28. The AAV particle of any one of embodiments 1-26, wherein [N1] is or comprises GHD.
   29. The AAV particle of any one of embodiments 1-23 or 26-27, wherein [N1]-[N2]-[N3] comprises SGSPHSK (SEQ ID NO: 6756).
   30. The AAV particle of any one of embodiments 1-22, 24, 26, or 28, wherein [N1]-[N2]-[N3] comprises HDSPHKS (SEQ ID NO: 6757).
   31. The AAV particle of any one of embodiments 1-22 or 25-27, wherein [N1]-[N2]-[N3] comprises SGSPHKYG (SEQ ID NO: 6944).
   32. The AAV particle of any one of embodiments 1-8, 10, 12-23, 26-27, or 29, wherein [N1]-[N2]-[N3] is or comprises GSGSPHSKA (SEQ ID NO: 6613).
   33. The AAV particle of any one of embodiments 1-9, 11-22, 24, 26, 28, or 30, wherein [N1]-[N2]-[N3] is or comprises GHDSPHKSG (SEQ ID NO: 6615).
   34. The AAV particle of any one of embodiments 1-8, 10, 12-22, 25-27, or 31, wherein [N1]-[N2]-[N3] is or comprises GSGSPHKYG (SEQ ID NO: 6844).
   35. The AAV particle of any one of embodiments 1-34, wherein [N1]-[N2]-[N3] replaces positions 453-455, numbered according to the amino acid sequence of SEQ ID NO: 138.
   36. The AAV particle of any one of embodiments 1-35, wherein the AAV capsid variant comprises an amino acid other than Q at position 456 (e.g., W, K, R, G, L, V, S, P, H, K, I, M, A, E, or F), an amino acid other than N at position 457 (e.g., Y, C, K, T, H, R, D, V, S, P, G, W, E, F, A, I, M, Q, or L), an amino acid other than Q at position 458 (e.g., G, K, H, R, T, L, D, A, P, I, F, V, M, W, Y, S, E, N, or Y), and/or an amino acid other than Q at position 459 (e.g., H, L, R, W, K, A, P, E, M, 1, S, G, N, Y, C, V, T, D, or V), relative to a reference sequence numbered according to SEQ ID NO: 138.
   37. The AAV capsid particle of any one of embodiments 1-36, wherein the AAV capsid variant comprises an amino acid other than Q at position 462 (e.g., W, K, R, G, L, V, S, P, H, K, I, M, A, E, or F), an amino acid other than N at position 463 (e.g., Y, C, K, T, H, R, D, V, S, P, G, W, E, F, A, I, M, Q, or L), an amino acid other than Q at position 464 (e.g., G, K, H, R, T, L, D, A, P, 1, F, V, M, W, Y, S, E, N, or Y), and/or an amino acid other than Q at position 465 (e.g., H, L, R, W, K, A, P, E, M, I, S, G, N, Y, C, V, T, D, or V), relative to a reference sequence numbered according to SEQ ID NO: 981, 982, 36, 37, 39, 40, 42-46, 48, 49, 50, 52, 53, 56, or 57.
   38. The AAV particle of any one of embodiments 1-37, wherein the AAV capsid variant comprises:
[0060] (a) the amino acid Q at position 456, the amino acid N at position 457, the amino acid Q at position 458, and/or the amino acid Q at position 459, relative to a reference sequence numbered according to SEQ ID NO: 138; or
[0061] (b) the amino acid Q at position 462, the amino acid N at position 463, the amino acid Q at position 464, and/or the amino acid Q at position 465, relative to a reference sequence numbered according to SEQ ID NO: 981, 982, 36, 37, 39, 40, 42-46, 48, 49, 50, 52, 53, 56, or 57.
   39. The AAV particle of any one of embodiments 1-38, wherein the AAV capsid variant further comprises [N4], wherein [N4] comprises X7 X8 X9 X10, and wherein:
[0062] (a) position X7 is: Q, W, K, R, G, L, V, S, P, H, K, I, M, A, E, or F;
[0063] (b) position X8 is: N, Y, C, K, T, H, R, D, V, S, P, G, W, E, F, A, I, M, Q, or L;
[0064] (c) position X9 is: Q, G, K, H, R, T, L, D, A, P, I, F, V, M, W, Y, S, E, N, or Y; and
[0065] (d) position X10 is: Q, H, L, R, W, K, A, P, E, M, I, S, G, N, Y, C, V, T, D, or V;
   optionally wherein the AAV capsid variant comprises an amino acid modification, e.g., a conservative substitution, of any of the aforesaid amino acids in (a)-(d).
   40. The AAV particle of embodiment 39, wherein:
[0066] (a) position X7 of [N4] is Q or R;
[0067] (b) position X8 of [N4] is N or R;
[0068] (c) position X9 of [N4] is Q or R; and
[0069] (d) position X10 of [N4] is Q, L, or R.
   41. The AAV particle of embodiment 39 or 40, wherein [N4] is or comprises:

(i)
(SEQ ID NO: 6945)
QNQQ,
(SEQ ID NO: 6946)
WNQQ,
(SEQ ID NO: 6947)
QYYV,
(SEQ ID NO: 6948)
RRQQ,
(SEQ ID NO: 6949)
GCGQ,
(SEQ ID NO: 6950)
LRQQ,
(SEQ ID NO: 6951)
RNQQ,
(SEQ ID NO: 6952)
VNQQ,
(SEQ ID NO: 6953)
FRLQ,
(SEQ ID NO: 6954)
FNQQ,
(SEQ ID NO: 6955)
LLQQ,
(SEQ ID NO: 6956)
SNQQ,
(SEQ ID NO: 6957)
RLQQ,
(SEQ ID NO: 6958)
LNQQ,
(SEQ ID NO: 6959)
QRKL,
(SEQ ID NO: 6960)
LRRQ,
(SEQ ID NO: 6961)
QRLR,
(SEQ ID NO: 6962)
QRRL,
(SEQ ID NO: 6963)
RRLQ,
(SEQ ID NO: 6964)
RLRQ,
(SEQ ID NO: 6965)
SKRQ,
(SEQ ID NO: 6966)
QLYR,
(SEQ ID NO: 6967)
QLTV,
(SEQ ID NO: 6968)
QNKQ,
(SEQ ID NO: 6969)
KNQQ,
(SEQ ID NO: 6970)
QKQQ,
(SEQ ID NO: 6971)
QTQQ,
(SEQ ID NO: 6972)
QNHQ,
(SEQ ID NO: 6973)
QHQQ,
(SEQ ID NO: 6974)
QNQH,
(SEQ ID NO: 6975)
QHRQ,
(SEQ ID NO: 6976)
LTQQ,
(SEQ ID NO: 6977)
QNQW,
(SEQ ID NO: 6978)
QNTH,
(SEQ ID NO: 6979)
RRRQ,
(SEQ ID NO: 6980)
QYQQ,
(SEQ ID NO: 6981)
QNDQ,
(SEQ ID NO: 6982)
QNRH,
(SEQ ID NO: 6983)
RDQQ,
(SEQ ID NO: 6984)
PNLQ,
(SEQ ID NO: 6985)
HVRQ,
(SEQ ID NO: 6986)
PNQH,
(SEQ ID NO: 6987)
HNQQ,
(SEQ ID NO: 6988)
QSQQ,
(SEQ ID NO: 6989)
QPAK,
(SEQ ID NO: 6990)
QNLA,
(SEQ ID NO: 6991)
QNQL,
(SEQ ID NO: 6992)
QGQQ,
(SEQ ID NO: 6993)
LNRQ,
(SEQ ID NO: 6994)
QNPP,
(SEQ ID NO: 6995)
QNLQ,
(SEQ ID NO: 6996)
QDQE,
(SEQ ID NO: 6997)
QDQQ,
(SEQ ID NO: 6998)
HWQQ,
(SEQ ID NO: 6999)
PNQQ,
(SEQ ID NO: 7000)
PEQQ,
(SEQ ID NO: 7001)
QRTM,
(SEQ ID NO: 7002)
LHQH,
(SEQ ID NO: 7003)
QHRI,
(SEQ ID NO: 7004)
QYIH,
(SEQ ID NO: 7005)
QKFE,
(SEQ ID NO: 7006)
QFPS,
(SEQ ID NO: 7007)
QNPL,
(SEQ ID NO: 7008)
QAIK,
(SEQ ID NO: 7009)
QNRQ,
(SEQ ID NO: 7010)
QYQH,
(SEQ ID NO: 7011)
QNPQ,
(SEQ ID NO: 7012)
QHQL,
(SEQ ID NO: 7013)
QSPP,
(SEQ ID NO: 7014)
QAKL,
(SEQ ID NO: 7015)
KSQQ,
(SEQ ID NO: 7016)
QDRP,
(SEQ ID NO: 7017)
QNLG,
(SEQ ID NO: 7018)
QAFH,
(SEQ ID NO: 7019)
QNAQ,
(SEQ ID NO: 7020)
HNQL,
(SEQ ID NO: 7021)
QKLN,
(SEQ ID NO: 7022)
QNVQ,
(SEQ ID NO: 7023)
QAQQ,
(SEQ ID NO: 7024)
QTPP,
(SEQ ID NO: 7025)
QPPA,
(SEQ ID NO: 7026)
QERP,
(SEQ ID NO: 7027)
QDLQ,
(SEQ ID NO: 7028)
QAMH,
(SEQ ID NO: 7029)
QHPS,
(SEQ ID NO: 7030)
PGLQ,
(SEQ ID NO: 7031)
QGIR,
(SEQ ID NO: 7032)
QAPA,
(SEQ ID NO: 7033)
QIPP,
(SEQ ID NO: 7034)
QTQL,
(SEQ ID NO: 7035)
QAPS,
(SEQ ID NO: 7036)
QNTY,
(SEQ ID NO: 7037)
QDKQ,
(SEQ ID NO: 7038)
QNHL,
(SEQ ID NO: 7039)
QIGM,
(SEQ ID NO: 7040)
LNKQ,
(SEQ ID NO: 7041)
PNQL,
(SEQ ID NO: 7042)
QLQQ,
(SEQ ID NO: 7043)
QRMS,
(SEQ ID NO: 7044)
QGIL,
(SEQ ID NO: 7045)
QDRQ,
(SEQ ID NO: 7046)
RDWQ,
(SEQ ID NO: 7047)
QERS,
(SEQ ID NO: 7048)
QNYQ,
(SEQ ID NO: 7049)
QRTC,
(SEQ ID NO: 7050)
QIGH,
(SEQ ID NO: 7051)
QGAI,
(SEQ ID NO: 7052)
QVPP,
(SEQ ID NO: 7053)
QVQQ,
(SEQ ID NO: 7054)
LMRQ,
(SEQ ID NO: 7055)
QYSV,
(SEQ ID NO: 7056)
QAIT,
(SEQ ID NO: 7057)
QKTL,
(SEQ ID NO: 7058)
QLHH,
(SEQ ID NO: 7059)
QNII,
(SEQ ID NO: 7060)
QGHH,
(SEQ ID NO: 7061)
QSKV,
(SEQ ID NO: 7062)
QLPS,
(SEQ ID NO: 7063)
IGKQ,
(SEQ ID NO: 7064)
QAIH,
(SEQ ID NO: 7065)
QHGL,
(SEQ ID NO: 7066)
QFMC,
(SEQ ID NO: 7067)
QNQM,
(SEQ ID NO: 7068)
QHLQ,
(SEQ ID NO: 7069)
QPAR,
(SEQ ID NO: 7070)
QSLQ,
(SEQ ID NO: 7071)
QSQL,
(SEQ ID NO: 7072)
HSQQ,
(SEQ ID NO: 7073)
QMPS,
(SEQ ID NO: 7074)
QGSL,
(SEQ ID NO: 7075)
QVPA,
(SEQ ID NO: 7076)
HYQQ,
(SEQ ID NO: 7077)
QVPS,
(SEQ ID NO: 7078)
RGEQ,
(SEQ ID NO: 7079)
PGQQ,
(SEQ ID NO: 7080)
LEQQ,
(SEQ ID NO: 7081)
QNQS,
(SEQ ID NO: 7082)
QKVI,
(SEQ ID NO: 7083)
QNND,
(SEQ ID NO: 7084)
QSVH,
(SEQ ID NO: 7085)
QPLG,
(SEQ ID NO: 7086)
HNQE,
(SEQ ID NO: 7087)
QIQQ,
(SEQ ID NO: 7088)
QVRN,
(SEQ ID NO: 7089)
PSNQ,
(SEQ ID NO: 7090)
QVGH,
(SEQ ID NO: 7091)
QRDI,
(SEQ ID NO: 7092)
QMPN,
(SEQ ID NO: 7093)
RGLQ,
(SEQ ID NO: 7094)
PSLQ,
(SEQ ID NO: 7095)
QRDQ,
(SEQ ID NO: 7096)
QAKG,
(SEQ ID NO: 7097)
QSAH,
(SEQ ID NO: 7098)
QSTM,
(SEQ ID NO: 7099)
QREM,
(SEQ ID NO: 7100)
QYRA,
(SEQ ID NO: 7101)
QRQQ,
(SEQ ID NO: 7102)
QWQQ,
(SEQ ID NO: 7103)
QRMN,
(SEQ ID NO: 7104)
GDSQ,
(SEQ ID NO: 7105)
QKIS,
(SEQ ID NO: 7106)
PSMQ,
(SEQ ID NO: 7107)
SPRQ,
(SEQ ID NO: 7108)
MEQQ,
(SEQ ID NO: 7109)
QYQN,
(SEQ ID NO: 7110)
QIRQ,
(SEQ ID NO: 7111)
QSVQ,
(SEQ ID NO: 7112)
RSQQ,
(SEQ ID NO: 7113)
QNKL,
(SEQ ID NO: 7114)
QIQH,
(SEQ ID NO: 7115)
PRQQ,
(SEQ ID NO: 7116)
HTQQ,
(SEQ ID NO: 7117)
QRQH,
(SEQ ID NO: 7118)
RNQE,
(SEQ ID NO: 7119)
QSKQ,
(SEQ ID NO: 7120)
QNQP,
(SEQ ID NO: 7121)
QSPQ,
(SEQ ID NO: 7122)
QTRQ,
(SEQ ID NO: 7123)
QNLH,
(SEQ ID NO: 7124)
QNQE,
(SEQ ID NO: 7125)
LNQP,
(SEQ ID NO: 7126)
QNQD,
(SEQ ID NO: 7127)
QNLL,
(SEQ ID NO: 7128)
QLVI,
(SEQ ID NO: 7129)
RTQE,
(SEQ ID NO: 7130)
QTHQ,
(SEQ ID NO: 7131)
QDQH,
(SEQ ID NO: 7132)
QSQH,
(SEQ ID NO: 7133)
VRQQ,
(SEQ ID NO: 7134)
AWQQ,
(SEQ ID NO: 7135)
QSVP,
(SEQ ID NO: 7136)
QNIQ,
(SEQ ID NO: 7137)
LDQQ,
(SEQ ID NO: 7138)
PDQQ,
(SEQ ID NO: 7139)
ESQQ,
(SEQ ID NO: 7140)
QRQL,
(SEQ ID NO: 7141)
QIIV,
(SEQ ID NO: 7142)
QKQS,
(SEQ ID NO: 7143)
QSHQ,
(SEQ ID NO: 7144)
QFVV,
(SEQ ID NO: 7145)
QSQP,
(SEQ ID NO: 7146)
QNEQ,
(SEQ ID NO: 7147)
INQQ,
(SEQ ID NO: 7148)
RNRQ,
(SEQ ID NO: 7149)
RDQK,
(SEQ ID NO: 7150)
QWKR,
(SEQ ID NO: 7151)
ENRQ,
(SEQ ID NO: 7152)
QTQP,
(SEQ ID NO: 7153)
QKQL,
(SEQ ID NO: 7154)
RNQL,
(SEQ ID NO: 7155)
ISIQ,
(SEQ ID NO: 7156)
QTVC,
(SEQ ID NO: 7157)
QQIM,
(SEQ ID NO: 7158)
LNHQ,
(SEQ ID NO: 7159)
QNQA,
(SEQ ID NO: 7160)
QMIH,
(SEQ ID NO: 7161)
RNHQ,
or
(SEQ ID NO:7162)
QKMN;

[0070] (ii) an amino acid sequence comprising any portion of an amino acid sequence in (i), e.g., any 2, or 3 amino acids, e.g., consecutive amino acids, thereof;
[0071] (iii) an amino acid sequence comprising one, two, or three but no more than four modifications, e.g., substitutions (e.g., conservative substitutions), insertions, or deletions, relative to any of the amino acid sequences in (i); or
[0072] (iv) an amino acid sequence comprising one, two, or three but no more than four different amino acids, relative to any one of the amino acid sequences in (i).
   42. The AAV particle of any one of embodiments 39-41, wherein [N1]-[N2]-[N3]-[N4] is or comprises:
[0073] (i) the amino acid sequence of any of SEQ ID NOs: 1800-2241;
[0074] (ii) an amino acid sequence comprising any portion of an amino acid sequence in (i), e.g., any 2, 3, 4, 5, 6, 7, 8, 9, 10, 11, or 12 amino acids, e.g., consecutive amino acids, thereof;
[0075] (iii) an amino acid sequence comprising one, two, or three but no more than four modifications, e.g., substitutions (e.g., conservative substitutions), insertions, or deletions, relative to any of the amino acid sequences in (i); or
[0076] (iv) an amino acid sequence comprising one, two, or three but no more than four different amino acids, relative to any one of the amino acid sequences in (i).
   43. The AAV particle of any one of embodiments 37-42, wherein [N1]-[N2]-[N3]-[N4] is or comprises

(SEQ ID NO: 1801)
GSGSPHSKAQNQQ.

[0077] 44. The AAV particle of any one of embodiments 37-42, wherein [N1]-[N2]-[N3]-[N4] is or comprises

(SEQ ID NO: 1800)
GHDSPHKSGQNQQ.

[0078] 45. The AAV particle of any one of embodiments 37-42, wherein [N1]-[N2]-[N3]-[N4] is or comprises

(SEQ ID NO: 910)
GSGSPHKYGQNQQT.

46. The AAV particle of any one of embodiments 1-45, wherein the AAV capsid variant comprises an amino acid other than T at position 450 (e.g., S, Y, M, A, C, I, R, L, D, F, V, Q, N, H, E, or G), an amino acid other than I at position 451 (e.g., M, P, E, N, D, S, A, T, G, Q, F, V, L, C, H, R, W, or L), and/or an amino acid other than N at position 452 (e.g., M, E, G, Y, W, T, I, Q, F, V, A, L, I, P, K, R, H, S, D, or S), relative to a reference sequence numbered according to any one of SEQ ID NOs: 36-59, 138, 981 or 982.
47. The AAV particle of any one of embodiments 1-46, wherein the AAV capsid variant comprises the amino acid T at position 450, the amino acid I at position 451, and/or the amino acid N at position 452, relative to a reference sequence numbered according to any one of SEQ ID NOs: 138, 981, or 982.
48. The AAV particle of any one of embodiments 1-47, wherein the AAV capsid variant further comprises [N0], wherein [N0] comprises XA XB and XC, and wherein:
[0079] (a) position XA is: T, S, Y, M, A, C, I, R, L, D, F, V, Q, N, H, E, or G;
[0080] (b) position XB is: I, M, P, E, N, D, S, A, T, G, Q, F, V, L, C, H, R, W, or L; and
[0081] (c) position XC is: N, M, E, G, Y, W, T, I, Q, F, V, A, L, I, P, K, R, H, S, D, or S; and
[0082] optionally wherein the AAV capsid variant comprises an amino acid modification, e.g., a conservative substitution, of any of the aforesaid amino acids in (a)-(c).
   49. The AAV particle of embodiment 48, wherein [N0] is or comprises TIN, SMN, TIM, YLS, GLS, MPE, MEG, MEY, AEW, CEW, ANN, IPE, ADM, IEY, ADY, IET, MEW, CEY, RIN, MEI, LEY, ADW, IEI, DIM, FEQ, MEF, CDQ, LPE, IEN, MES, AEI, VEY, IIN, TSN, IEV, MEM, AEV, MDA, VEW, AEQ, LEW, MEL, MET, MEA, IES, MEV, CEI, ATN, MDG, QEV, ADQ, NMN, IEM, ISN, TGN, QQQ, HDW, IEG, TII, TFP, TEK, EIN, TVN, TFN, SIN, TER, TSY, ELH, AIN, SVN, TDN, TFH, TVH, TEN, TSS, TID, TCN, NIN, TEH, AEM, AIK, TDK, TFK, SDQ, TEI, NTN, TET, SIK, TEL, TEA, TAN, TIY, TFS, TES, TTN, TED, TNN, EVH, TIS, TVR, TDR, TIK, NHI, TIP, ESD, TDL, TVP, TVI, AEH, NCL, TVK, NAD, TIT, NCV, TIR, NAL, VIN, TIQ, TEF, TRE, QGE, SEK, NVN, GGE, EFV, SDK, TEQ, EVQ, TEY, NCW, TDV, SDI, NSI, NSL, EVV, TEP, SEL, TWQ, TEV, AVN, GVL, TLN, TEG, TRD, NAI, AEN, AET, ETA, NNL, or any dipeptide thereof.
   50. The AAV particle of embodiment 48 or 49, wherein [N0]-[N1]-[N2]-[N3]-[N4] is or comprises:
[0083] (i) the amino acid sequence of any one of SEQ ID NOs: 2242-2886;
[0084] (ii) an amino acid sequence comprising any portion of an amino acid sequence in (i), e.g., any 2, 3, 4, 5, 6, 7, 8, 9, 10, 11, 12, 13, 14, or 15 amino acids, e.g., consecutive amino acids, thereof;
[0085] (iii) an amino acid sequence comprising one, two, or three but no more than four modifications, e.g., substitutions (e.g., conservative substitutions), insertions, or deletions, relative to any of the amino acid sequences in (i); or
[0086] (iv) an amino acid sequence comprising one, two, or three but no more than four different amino acids, relative to any one of the amino acid sequences in (i).
   51. The AAV particle of any one of embodiments 48-50, wherein [N0]-[N1]-[N2]-[N3]-[N4] is or comprises TINGSGSPHSKAQNQQ (SEQ ID NO: 2242).
   52. The AAV particle of any one of embodiments 48-50, wherein [N0]-[N1]-[N2]-[N3]-[N4] is or comprises TINGHDSPHKSGQNQQ (SEQ ID NO: 2243).
   53. The AAV particle of any one of embodiments 48-50, wherein [N0]-[N1]-[N2]-[N3]-[N4] is or comprises TINGSGSPHKYGQNQQT (SEQ ID NO: 6551).
   54. The AAV particle of any one of embodiments 1-53, wherein [N1]-[N2]-[N3] is present in loop IV of the AAV capsid variant.
   55. The AAV particle of any one of embodiments 48-54, wherein [N0] and [N4] are present in loop IV of the AAV capsid variant.
   56. The AAV particle of any one of embodiments 48-55, wherein [N0] is present immediately subsequent to position 449, relative to a reference sequence numbered according to the amino acid sequence of SEQ ID NO: 138.
   57. The AAV particle of any one of embodiments 48-55, wherein [N0] is present immediately subsequent to position 449, relative to a reference sequence numbered according to the amino acid sequence of any one of SEQ ID NO: 36-59, 981, or 982.
   58. The AAV particle of any one of embodiments 48-57, wherein [N0] replaces positions 450, 451, and 452 (e.g., T450, I451, and N452), relative to a reference sequence numbered according to SEQ ID NO: 138.
   59. The AAV particle of any one of embodiments 48-58, wherein [N0] replaces positions 450-452 (e.g., T450, I451, and N452), relative to a reference sequence numbered according to any one of SEQ ID NOs: 36-59, 981, or 982.
   60. The AAV particle of any one of embodiments 48-59, wherein [N0] corresponds to positions 450-452 of any one of SEQ ID NOs: 36-59, 138, 981 or 982.
   61. The AAV particle of any one of embodiments 48-60, wherein [N0] is present immediately subsequent to position 449 and wherein [N0] replaces positions 450-452 (e.g., T450, I451, and N452), relative to a reference sequence numbered according to SEQ ID NO: 138.
   62. The AAV particle of any one of embodiments 48-61, wherein [N0] is present immediately subsequent to position 449 and wherein [N0] replaces positions 450-452 (e.g., T450, I451, and N452), relative to a reference sequence numbered according to any one of SEQ ID NOs: 36-59, 981 or 982.
   63. The AAV particle of any one of embodiments 1-62, wherein [N1] is present immediately subsequent to position 452, relative to a reference sequence numbered according to the amino acid sequence of SEQ ID NO: 138.
   64. The AAV particle of any one of embodiments 1-63, wherein [N1] is present immediately subsequent to position 452, relative to a reference sequence numbered according to the amino acid sequence of SEQ ID NO: 981 or 982.
   65. The AAV particle of any one of embodiments 1-64, wherein [N1] replaces positions 453-455 (e.g., G453, S454, and G455), relative to a reference sequence numbered according to SEQ ID NO: 138.
   66. The AAV particle of any one of embodiments 1-65, wherein [N1] replaces positions 453 (e.g., G453), relative to a reference sequence numbered according to SEQ ID NO: 138.
   67. The AAV particle of any one of embodiments 1-66, wherein [N1] replaces positions 453-455 (e.g., G453, 5454, and G455), relative to a reference sequence numbered according to SEQ ID NO: 981.
   68. The AAV particle of any one of embodiments 1-66 or 67, wherein [N1] replaces positions 453-455, relative to a reference sequence numbered according to SEQ ID NO: 982.
   69. The AAV particle of any one of embodiments 1-68, wherein [N1] is present immediately subsequent to position 452 and wherein [N1] replaces positions 453-455 (e.g., G453, S454, and G455), relative to a reference sequence numbered according to SEQ ID NO: 138.
   70. The AAV particle of any one of embodiments 1-64, or 66, wherein [N1] is present immediately subsequent to position 452 and wherein [N1] replaces positions 453 (e.g., G453), relative to a reference sequence numbered according to SEQ ID NO: 138.
   71. The AAV particle of any one of embodiments 1-64, 66, or 70, wherein [N1] is present immediately subsequent to position 452 and wherein [N1] replaces positions 453-455, relative to a reference sequence numbered according to SEQ ID NO: 981 or 982.
   72. The AAV particle of any one of embodiments 1-71, wherein [N1] corresponds to positions 453-455 of any one of SEQ ID NOs: 36-59, 981 or 982.
   73. The AAV particle of any one of embodiment 1-72, wherein the AAV capsid variant comprises an amino acid other than S at position 454 and/or an amino acid other than G at position 455, numbered according to SEQ ID NO: 138, 981, or 982.
   74. The AAV particle of any one of embodiments 1-73, wherein the AAV capsid variant comprises the amino acid H at position 454 and the amino acid D at position 455, numbered according to SEQ ID NO: 138.
   75. The AAV particle of any one of embodiments 1-74, wherein the AAV capsid variant comprises a substitution at position 454 (e.g., S454H) and/or a substitution at position 455 (e.g., G455D), numbered according to SEQ ID NO: 138 or 982.
   76. The AAV particle of any one of embodiments 1-75, wherein the AAV capsid variant comprises the amino acid H at position 454 and the amino acid D at position 455, and further comprises the amino acid sequence SPHSKA (SEQ ID NO: 941) immediately subsequent to position 455, relative to a reference sequence numbered according to SEQ ID NO: 138.
   77. The AAV particle of any one of embodiments 1-71, wherein the AAV capsid variant comprises the amino acid H at position 454 and the amino acid D at position 455, relative to a reference sequence numbered according to SEQ ID NO: 982.
   78. The AAV particle of any one of embodiments 1-77, wherein the AAV capsid variant comprises the amino acid H at position 454 and the amino acid D at position 455, and further comprises the amino acid sequence SPHSKA (SEQ ID NO: 941) immediately subsequent to position 455, relative to a reference sequence numbered according to SEQ ID NO: 982.
   79. The AAV particle of any one of embodiments 1-71, wherein the AAV capsid variant comprises the amino acid S at position 454 and the amino acid G at position 455, relative to a reference sequence numbered according to SEQ ID NO: 138.
   80. The AAV particle of any one of embodiments 1-71 or 79, wherein the AAV capsid variant comprises the amino acid S at position 454 and the amino acid G at position 455, and further comprises the amino acid sequence SPHSKA (SEQ ID NO: 941) immediately subsequent to position 455, relative to a reference sequence numbered according to SEQ ID NO: 138.
   81. The AAV particle of any one of embodiments 1-71, 79, or 80, wherein the AAV capsid variant comprises the amino acid S at position 454 and the amino acid G at position 455, relative to a reference sequence numbered according to SEQ ID NO: 981.
   82. The AAV particle of any one of embodiments 1-71 or 79-81, wherein the AAV capsid variant comprises the amino acid S at position 454 and the amino acid G at position 455, and further comprises the amino acid sequence SPHSKA (SEQ ID NO: 941) immediately subsequent to position 455, relative to a reference sequence numbered according to SEQ ID NO: 981.
   83. The AAV particle of any one of embodiments 1-82, wherein [N2] is present immediately subsequent to position 455, relative to a reference sequence numbered according to the amino acid sequence of SEQ ID NO: 138.
   84. The AAV particle of any one of embodiments 1-82, wherein [N2] corresponds to positions 456-458 (e.g., 5456, P457, H458) of SEQ ID NO: 981 or 982.
   85. The AAV particle of any one of embodiments 1-84, wherein [N2] corresponds to positions 456-458 (e.g., S456, P457, H458) of any one of SEQ ID NOs: 36-59.
   86. The AAV particle of any one of embodiments 1-85, wherein [N2]-[N3] is present immediately subsequent to position 455, relative to a reference sequence numbered according to the amino acid sequence of SEQ ID NO: 138.
   87. The AAV particle of any one of embodiments 1-86, wherein [N2] is present immediately subsequent to position 455, relative to a reference sequence numbered according to the amino acid sequence of SEQ ID NO: 981 or 982.
   88. The AAV particle of any one of embodiments 1-87, wherein [N2]-[N3] is present immediately subsequent to position 455, relative to a reference sequence numbered according to the amino acid sequence of SEQ ID NO: 981 or 982.
   89. The AAV particle of any one of embodiments 1-88, wherein [N2]-[N3] corresponds to positions 456-461 (e.g., S456, P457, H458, S459, K460, A461) of SEQ ID NO: 981.
   90. The AAV particle of any one of embodiments 1-88, wherein [N2]-[N3] corresponds to positions 456-461 (e.g., S456, P457, H458, K459, 5460, G461) of SEQ ID NO: 982.
   91. The AAV particle of any one of embodiments 1-90, wherein [N2] is present immediately subsequent to [N1].
   92. The AAV particle of any one of embodiments 1-64, 66, 70, or 71, wherein [N3] is present immediately subsequent to [N2] and replaces positions 454 and 455 (e.g., S454 and G455), numbered according to SEQ ID NO: 138.
   93. The AAV particle of any one of embodiments 1-64, 66, 70, 71, or 92, wherein [N3] is present immediately subsequent to [N1]-[N2] and replaces positions 454 and 455 (e.g., S454 and G455), numbered according to SEQ ID NO: 138.
   94. The AAV particle of any one of embodiments 39-93, wherein [N4] is present immediately subsequent to position 455, relative to a reference sequence numbered according to the amino acid sequence of SEQ ID NO: 138.
   95. The AAV particle of any one of embodiments 39-94, wherein [N4] replaces positions 456-459 (e.g., Q456, N457, Q458, and Q459), relative to a reference sequence numbered according to the amino acid sequence of SEQ ID NO: 138.
   96. The AAV particle of any one of embodiments 39-95, wherein [N4] corresponds to positions 462-465 (e.g., Q462, N463, Q464, Q465) of SEQ ID NO: 981 or 982.
   97. The AAV particle of any one of embodiments 39-96, wherein [N2]-[N3]-[N4] replaces positions 456-459 (e.g., Q456, N457, Q458, and Q459), relative to a reference sequence numbered according to the amino acid sequence of SEQ ID NO: 138.
   98. The AAV particle of any one of embodiments 39-97, wherein [N2]-[N3]-[N4] is present immediately subsequent to position 455, and wherein [N2]-[N3]-[N4] replaces positions 456-459 (e.g., Q456, N457, Q458, and Q459), relative to a reference sequence numbered according to the amino acid sequence of SEQ ID NO: 138.
   99. The AAV particle of any one of embodiments 39-98, wherein [N2]-[N3]-[N4] corresponds to positions 456-465 (e.g., 5456, P457, H458, S459, K460, A461, Q462, N463, Q464, Q465) of SEQ ID NO: 981.
   100. The AAV particle of any one of embodiments 39-99, wherein [N2]-[N3]-[N4] corresponds to positions 456-465 (e.g., S456, P457, H458, K459, 5460, G461, Q462, N463, Q464, Q465) of SEQ ID NO: 982.
   101. The AAV particle of any one of embodiments 39-100, wherein [N2]-[N3]-[N4] corresponds to positions 456-465 of any one of SEQ ID NOs: 36-59.
   102. The AAV particle of any one of embodiments 39-101, wherein [N1]-[N2]-[N3]-[N4] replaces positions 453-459 (e.g., G453, 5454, G455, Q456, N457, Q458, and Q459), relative to a reference sequence numbered according to the amino acid sequence of SEQ ID NO: 138.
   103. The AAV particle of any one of embodiments 39-102, wherein [N1]-[N2]-[N3]-[N4] is present immediately subsequent to position 452, and wherein [N1]-[N2]-[N3]-[N4] replaces positions 453-459 (e.g., G453, S454, G455, Q456, N457, Q458, and Q459), relative to a reference sequence numbered according to the amino acid sequence of SEQ ID NO: 138.
   104. The AAV particle of any one of embodiments 39-99, 102, or 103, wherein [N1]-[N2]-[N3]-[N4] corresponds to positions 453-465 (e.g., G453, S454, G455, S456, P457, H458, S459, K460, A461, Q462, N463, Q464, Q465) of SEQ ID NO: 981.
   105. The AAV particle of any one of embodiments 39-98 or 100-103, wherein [N1]-[N2]-[N3]-[N4] corresponds to positions 453-465 (e.g., G453, H454, D455, S456, P457, H458, K459, S460, G461, Q462. N463, Q464, Q465) of SEQ ID NO: 982.
   106. The AAV particle of any one of embodiments 39-98, or 101-103, wherein [N1]-[N2]-[N3]-[N4] corresponds to positions 453-465 of any one of SEQ ID NOs: 36-59.
   107. The AAV particle of any one of embodiments 1-98 or 102-104 wherein [N1]-[N2]-[N3] corresponds to positions 453-461 (e.g., G453, S454, G455, S456, P457, H458, S459, K460, A461) of SEQ ID NO: 981.
   108. The AAV particle of any one of embodiments 1-98, 100, 102, 103, or 105, wherein [N1]-[N2]-[N3] corresponds to positions 453-461 (e.g., G453, H454, D455, S456, P457, H458, K459, S460, G461) of SEQ ID NO: 982.
   109. The AAV particle of any one of embodiments 40-98, 101-103, or 106, wherein [N1]-[N2]-[N3] corresponds to positions 453-461 of any one of SEQ ID NOs: 36-59.
   110. The AAV particle of any one of embodiments 39-109, wherein [N0]-[N1]-[N2]-[N3]-[N4] replaces positions 450-459 (e.g., T450, I451. N452, G453, S454, G455, Q456, N457, Q458, and Q459), relative to a reference sequence numbered according to the amino acid sequence of SEQ ID NO: 138.
   111. The AAV particle of any one of embodiments 39-110, wherein [N0]-[N1]-[N2]-[N3]-[N4] is present immediately subsequent to position 449, and wherein [N0]-[N1]-[N2]-[N3]-[N4] replaces positions 450-459 (e.g., T450, I451, N452, G453, S454, G455, Q456, N457, Q458, and Q459), relative to a reference sequence numbered according to the amino acid sequence of SEQ ID NO: 138.
   112. The AAV particle of any one of embodiments 39-99, 102-104, 110 or 111, wherein [N0]-[N1]-[N2]-[N3]-[N4] corresponds to positions 450-465 (e.g., T450, I451, N452, G453, S454, G455, S456, P457, H458, S459, K460, A461, Q462, N463, Q464. Q465) of SEQ ID NO: 981.
   113. The AAV particle of any one of embodiments 39-98, 100-103, or 105-111, wherein [N0]-[N1]-[N2]-[N3]-[N4] corresponds to positions 450-465 (e.g., T450, I451, N452, G453, H454, D455, S456, P457, H458, K459, S460, G461, Q462, N463, Q464. Q465) of SEQ ID NO: 982.
   114. The AAV particle of any one of embodiments 48-98, 101-103, 106, or 109, wherein [N0]-[N1]-[N2]-[N3]-[N4] corresponds to positions 450-465 of any one of SEQ ID NOs: 36-59.
   115. The AAV particle of any one of embodiments 38-99, wherein [N4] replaces positions 462-465 (e.g., Q462, N463, Q464, and Q465), relative to a reference sequence numbered according to the amino acid sequence of SEQ ID NO: 981 or 982.
   116. The AAV particle of any one of embodiments 39-115, wherein [N2]-[N3]-[N4] replaces positions 462-465 (e.g., Q462, N463, Q464, and Q465), relative to a reference sequence numbered according to the amino acid sequence of SEQ ID NO: 981 or 982.
   117. The AAV particle of any one of embodiments 39-116, wherein [N2]-[N3]-[N4] is present immediately subsequent to position 455, and wherein [N2]-[N3]-[N4] replaces positions 462-465 (e.g., Q462, N463, Q464, and Q465), relative to a reference sequence numbered according to the amino acid sequence of SEQ ID NO: 981 or 982.
   118. The AAV particle of any one of embodiments 1-117, wherein [N3] is present immediately subsequent to [N2].
   119. The AAV particle of any one of embodiments 1-118, wherein the AAV capsid variant comprises from N-terminus to C-terminus, [N2]-[N3].
   120. The AAV particle of any one of embodiments 1-119, wherein the AAV capsid variant comprises from N-terminus to C-terminus, [N1]-[N2]-[N3].
   121. The AAV particle of any one of embodiments 28-120, wherein the AAV capsid variant comprises from N-terminus to C-terminus, [N0]-[N1]-[N2]-[N3].
   122. The AAV particle of any one of embodiments 25-121, wherein the AAV capsid variant comprises from N-terminus to C-terminus, [N1]-[N2]-[N3]-[N4].
   123. The AAV particle of any one of embodiments 25-122, wherein the AAV capsid variant comprises from N-terminus to C-terminus, [N0]-[N1]-[N2]-[N3]-[N4].
   124. The AAV particle of any one of the preceding embodiments, wherein the AAV capsid variant comprises an amino acid other T at position 460 (e.g., N, I, C, H, R, L, D, Y, A, M, Q, I, E, K, P, G or S), numbered according to the amino acid sequence of SEQ ID NO: 138.
   125. The AAV particle of any one of the preceding embodiments, wherein the AAV capsid variant comprises the amino acid N, I, C, H, R, L, D, Y, A, M, Q, I, E, K, P, G or S at position 460, numbered according to the amino acid sequence of SEQ ID NO: 138.
   126. The AAV particle of any one of the preceding embodiments, wherein the AAV capsid variant comprises an amino acid other T at position 466 (e.g., N, I, C, H, R, L, D, Y, A, M, Q, I, E, K, P, G or S), numbered according to the amino acid sequence of any one of SEQ ID NOs: 36-59, 981 or 982.
   127. The AAV particle of any one of the preceding embodiments, wherein the AAV capsid variant comprises the amino acid N, I, C, H, R, L, D, Y, A, M, Q, I, E, K, P, G or S at position 466, numbered according to the amino acid sequence of any one of SEQ ID NOs: 36-59, 981 or 982.
   128. The AAV particle of any one of the preceding embodiments, wherein the AAV capsid variant comprises an amino acid other K at position 449 (e.g., an E, an N, or a T), numbered according to the amino acid sequence of any one of SEQ ID NOs: 36-59, 138, 981, or 982.
   129. The AAV particle of any one of the preceding embodiments, wherein the AAV capsid variant comprises the amino E, N, or T at position 449, numbered according to the amino acid sequence of any one of SEQ ID NOs: 36-59, 138, 981 or 982.
   130. An AAV particle comprising an AAV capsid variant and a nucleic acid comprising a transgene encoding an antibody molecule which binds to HER2/neu (e.g., human HER2/neu), wherein the AAV capsid variant comprises an amino acid sequence having the following formula: [N1]-[N2]-[N3], wherein:
[0087] (i) [N1] comprises positions X1, X2, and X3, wherein position X2 is S and position X3 is G;
[0088] (ii) [N2] comprises the amino acid sequence SPH; and
[0089] (iii) [N3] comprises positions X4, X5, and X6, wherein position X5 is K.
   131. The AAV particle of embodiment 130, wherein:
[0090] (i) X4 of [N3] is S, T, N, or A; and
[0091] (ii) X5 of [N3] is A, V, T, S, G, R, L, or N;
[0092] optionally wherein the AAV capsid variant comprises an amino acid modification, e.g., a conservative substitution, of any of the aforesaid amino acids in (i) or (ii).
   132. The AAV particle of embodiment 130 or 131, wherein X4 is S and/or X5 is A.
   133. The AAV particle of any one of embodiments 130-132, wherein [N3] comprises SK, TK, NK, AK, KA, KV, KT, KS, KG, KR, KL, or KN.
   134. The AAV particle of any one of embodiments 130-133, wherein [N3] is or comprises SKA, SKV, SKT, SKS, SKG, SKR, TKA, NKA, SKL, SKN, or AKA.
   135. The AAV particle of any one of embodiments 130-134, wherein [N3] is or comprises SKA.
   136. The AAV particle of any one of embodiments 130-135, wherein [N2]-[N3] comprises SPHSK (SEQ ID NO: 6617), SPHTK (SEQ ID NO: 6641), SPHNK (SEQ ID NO: 6642), or SPHAK (SEQ ID NO: 6643).
   137. The AAV particle of any one of embodiments 130-136, wherein [N2]-[N3] is or comprises:

(i)
(SEQ ID NO: 941)
SPHSKA,
(SEQ ID NO: 6653)
SPHSKV,
(SEQ ID NO: 6647)
SPHSKT,
(SEQ ID NO: 962)
SPHSKS,
(SEQ ID NO: 6648)
SPHSKG,
(SEQ ID NO: 978)
SPHSKR,
(SEQ ID NO: 6655)
SPHTKA,
(SEQ ID NO: 6650)
SPHNKA,
(SEQ ID NO: 960)
SPHSKL,
(SEQ ID NO: 6651)
SPHSKN,
or
(SEQ ID NO: 6652)
SPHAKA;

[0093] (ii) an amino acid sequence comprising any portion of an amino acid sequence in (i), e.g., any 2, 3, 4, or 5 amino acids, e.g., consecutive amino acids, thereof;
[0094] (iii) an amino acid sequence comprising one, two, or three but no more than four modifications, e.g., substitutions (e.g., conservative substitutions), insertions, or deletions, relative to any of the amino acid sequences in (i); or
[0095] (iv) an amino acid sequence comprising one, two, or three but no more than four different amino acids, relative to any one of the amino acid sequences in (i).
   138. The AAV particle of any one of embodiments 130-137, wherein [N2]-[N3] is or comprises SPHSKA (SEQ ID NO: 941).
   139. The AAV particle of any one of embodiments 130-138, which comprises an amino acid other than G at position 453 (e.g., M, T, I, E, S, A, N, V, L, K, H, P, R, W, or D), numbered according to SEQ ID NO: 138 or 981.
   140. The AAV particle of any one of embodiments 130-139, which comprises the amino acid G at position 453, numbered according to SEQ ID NO: 138 or 981.
   141. The AAV particle of any one of embodiments 130-140, wherein X1 of [N1] is chosen from: G, M, T, I, E, S, A, N, V, L, K, H, P, R, W, or D; optionally wherein the AAV capsid variant comprises an amino acid modification, e.g., a conservative substitution, of any of the aforesaid amino acids.
   142. The AAV particle of any one of embodiments 130-141, wherein [N1] comprises SG, GS, MS, TS, IS, ES, SS, AS, NS, VS, LS, KS, HS, PS, RS, WS, or DS.
   143. The AAV particle of any one of embodiments 130-142, wherein [N1] is or comprises: GSG, MSG, TSG, ISG, ESG, SSG, ASG, NSG, VSG, LSG, KSG, HSG, PSG, RSG, WSG, or DSG.
   144. The AAV particle of any one of embodiments 130-143, wherein [N1] is or comprises GSG.
   145. The AAV particle of any one of embodiments 130-144, wherein [N1]-[N2] comprises SGSPH (SEQ ID NO: 6668).
   146. The AAV particle of any one of embodiments 130-145, wherein [N1]-[N2] is or comprises:

(i)
(SEQ ID NO: 6700)
GSGSPH,
(SEQ ID NO: 6715)
MSGSPH,
(SEQ ID NO: 6717)
TSGSPH,
(SEQ ID NO: 6718)
ISGSPH,
(SEQ ID NO: 6720)
ESGSPH,
(SEQ ID NO: 6721)
SSGSPH,
(SEQ ID NO: 6723)
ASGSPH,
(SEQ ID NO: 6724)
NSGSPH,
(SEQ ID NO: 6703)
VSGSPH,
(SEQ ID NO: 6725)
LSGSPH,
(SEQ ID NO: 6727)
KSGSPH,
(SEQ ID NO: 6728)
HSGSPH,
(SEQ ID NO: 6730)
PSGSPH,
(SEQ ID NO: 6732)
RSGSPH,
(SEQ ID NO: 6734)
WSGSPH,
(SEQ ID NO: 6735)
DSGSPH;

[0096] (ii) an amino acid sequence comprising any portion of an amino acid sequence in (i), e.g., any 2, 3, 4, or 5 amino acids, e.g., consecutive amino acids, thereof;
[0097] (iii) an amino acid sequence comprising one, two, or three but no more than four modifications, e.g., substitutions (e.g., conservative substitutions), insertions, or deletions, relative to any of the amino acid sequences in (i); or
[0098] (iv) an amino acid sequence comprising one, two, or three but no more than four different amino acids, relative to any one of the amino acid sequences in (i).
   147. The AAV particle of any one of embodiments 130-146, wherein [N1]-[N2]-[N3] is or comprises:

(i)
(SEQ ID NO: 6613)
GSGSPHSKA,
(SEQ ID NO: 6873)
GSGSPHSKV,
(SEQ ID NO: 6874)
MSGSPHSKA,
(SEQ ID NO: 6876)
TSGSPHSKA,
(SEQ ID NO: 6877)
ISGSPHSKA,
(SEQ ID NO: 6879)
GSGSPHSKT,
(SEQ ID NO: 6880)
ESGSPHSKA,
(SEQ ID NO: 6881)
SSGSPHSKA,
(SEQ ID NO: 6870)
GSGSPHSKS,
(SEQ ID NO: 6883)
ASGSPHSKA,
(SEQ ID NO: 6884)
NSGSPHSKA,
(SEQ ID NO: 6830)
VSGSPHSKA,
(SEQ ID NO: 6885)
LSGSPHSKA,
(SEQ ID NO: 6887)
KSGSPHSKA,
(SEQ ID NO: 6889)
GSGSPHSKG,
(SEQ ID NO: 6862)
GSGSPHSKR,
(SEQ ID NO: 6890)
HSGSPHSKA,
(SEQ ID NO: 6892)
PSGSPHSKA,
(SEQ ID NO: 6894)
RSGSPHSKA,
(SEQ ID NO: 6895)
GSGSPHTKA,
(SEQ ID NO: 6897)
WSGSPHSKA,
(SEQ ID NO: 6898)
DSGSPHSKA,
(SEQ ID NO: 6900)
GSGSPHNKA,
(SEQ ID NO: 6860)
GSGSPHSKL,
(SEQ ID NO: 6911)
GSGSPHSKN,
or
(SEQ ID NO: 6912)
GSGSPHAKA;

[0099] (ii) an amino acid sequence comprising any portion of an amino acid sequence in (i), e.g., any 2, 3, 4, 5, 6, 7, 8, or 9 amino acids, e.g., consecutive amino acids, thereof;
[0100] (iii) an amino acid sequence comprising one, two, or three but no more than four modifications, e.g., substitutions (e.g., conservative substitutions), insertions, or deletions, relative to any of the amino acid sequences in (i); or
[0101] (iv) an amino acid sequence comprising one, two, or three but no more than four different amino acids, relative to any one of the amino acid sequences in (i).
   148. The AAV particle of any one of embodiments 130-147, wherein [N1]-[N2]-[N3] is or comprises

(SEQ ID NO: 6613)
GSGSPHSKA.

149. The AAV particle of any one of embodiments 130-148, wherein the AAV capsid variant comprises an amino acid other than Q at position 456 (e.g., R, P, H, L, K, I, G, S, M, or E), an amino acid other than N at position 457 (e.g., D, V, S, P, T, G, Y, W, E, R, H, K, F, A, I, L, or M), an amino acid other than Q at position 458 (e.g., R, L, A, P, H, T, I, F, K, V, M, G, W, Y, S, E, N, or D), an amino acid other than Q at position 459 (e.g., H, K, A, L, P, E, M, I, S, N, R, Y, C, V, T, W, D, G), and/or an amino acid other than T at position 460 (e.g., I, N, S, H, R, L, D, Y, A, or Q), relative to a reference sequence numbered according to SEQ ID NO: 138.
150. The AAV particle of any one of embodiments 130-149, wherein the AAV capsid variant comprises an amino acid other than Q at position 462 (e.g., R, P, H, L, K, I, G, S, M, or E), an amino acid other than N at position 463 (e.g., D, V, S, P, T, G, Y, W, E, R, H, K, F, A, I, L, or M), an amino acid other than Q at position 464 (e.g., R, L, A, P, H, T, I, F, K, V, M, G, W, Y, S, E, N, or D), an amino acid other than Q at position 465 (e.g., H, K, A, L, P, E, M, I, S, N, R, Y, C, V, T, W, D, G), and/or an amino acid other than T at position 466 (e.g., I, N, S, H, R, L, D, Y, A, or Q), relative to a reference sequence numbered according to SEQ ID NO: 981.
151. The AAV particle of any one of embodiments 130-150, wherein the AAV capsid variant comprises the amino acid Q at position 456, the amino acid N at position 457, the amino acid Q at position 458, the amino acid Q at position 459, and/or the amino acid T at position 460, relative to a reference sequence numbered according to SEQ ID NO: 138.
152. The AAV particle of any one of embodiments 130-151, wherein the AAV capsid variant comprises the amino acid Q at position 462, the amino acid N at position 463, the amino acid Q at position 464, the amino acid Q at position 465, and/or the amino acid T at position 466, numbered according to SEQ ID NO: 981
153. The AAV particle of any one of embodiments 130-152, wherein the AAV capsid variant further comprises [N4] wherein [N4] comprises X7, X8, X9, X10, and X11, wherein:
[0102] (a) X7 is Q, R, P, H, L, K, I, G, S, M, or E;
[0103] (b) X8 is N, D, V, S, P, T, G, Y, W, E, R, H, K, F, A, I, L, or M;
[0104] (c) X9 is Q, R, L, A, P, H, T, I, F, K, V, M, G, W, Y, S, E, N, D;
[0105] (d) X10 is Q, H, K, A, L, P, E, M, I, S, N, R, Y, C, V, T, W, D, G; and
[0106] (e) X11 is T, I, N, S, H, R, L, D, Y, A, Q;
[0107] optionally wherein the AAV capsid variant comprises an amino acid modification, e.g., a conservative substitution, of any of the aforesaid amino acids in (a)-(e).
   154. The AAV particle of embodiment 153, wherein [N4] is or comprises:

(i)
(SEQ ID NO: 7163)
QNQQT,
(SEQ ID NO: 7164)
QNRHT,
(SEQ ID NO: 7165)
RDQQT,
(SEQ ID NO: 7166)
PNLQT,
(SEQ ID NO: 7167)
HVRQT,
(SEQ ID NO: 7168)
PNQHT,
(SEQ ID NO: 7169)
QSQQT,
(SEQ ID NO: 7170)
QNQQI,
(SEQ ID NO: 7171)
QPAKT,
(SEQ ID NO: 7172)
QTQQN,
(SEQ ID NO: 7173)
QNLAT,
(SEQ ID NO: 7174)
QNQLT,
(SEQ ID NO: 7175)
QGQQT,
(SEQ ID NO: 7176)
LNRQS,
(SEQ ID NO: 7177)
HNQQT,
(SEQ ID NO: 7178)
QNPPT,
(SEQ ID NO: 7179)
QNLQT,
(SEQ ID NO: 7180)
QYQQT,
(SEQ ID NO: 7181)
QDQET,
(SEQ ID NO: 7182)
QNHQT,
(SEQ ID NO: 7183)
QDQQT,
(SEQ ID NO: 7184)
HWQQT,
(SEQ ID NO: 7185)
PNQQT,
(SEQ ID NO: 7186)
QNQLI,
(SEQ ID NO: 7187)
PEQQT,
(SEQ ID NO: 7188)
QRTMT,
(SEQ ID NO: 7189)
QNQQH,
(SEQ ID NO: 7190)
LHQHT,
(SEQ ID NO: 7191)
QHRIT,
(SEQ ID NO: 7192)
QYIHT,
(SEQ ID NO: 7193)
QKFET,
(SEQ ID NO: 7194)
QFPST,
(SEQ ID NO: 7195)
HNQQR,
(SEQ ID NO: 7196)
QAIKT,
(SEQ ID NO: 7197)
QNRQT,
(SEQ ID NO: 7198)
QYQHT,
(SEQ ID NO: 7199)
QNPQS,
(SEQ ID NO: 7200)
QHQLT,
(SEQ ID NO: 7201)
QSPPT,
(SEQ ID NO: 7202)
QAKLT,
(SEQ ID NO: 7203)
KSQQT,
(SEQ ID NO: 7204)
QDRPT,
(SEQ ID NO: 7205)
QSQQL,
(SEQ ID NO: 7206)
QAFHT,
(SEQ ID NO: 7207)
QKQQD,
(SEQ ID NO: 7208)
QNAQT,
(SEQ ID NO: 7209)
HNQLT,
(SEQ ID NO: 7210)
QNQQY,
(SEQ ID NO: 7211)
QKLNT,
(SEQ ID NO: 7212)
QNVQT,
(SEQ ID NO: 7213)
QAQQT,
(SEQ ID NO: 7214)
QNLQA,
(SEQ ID NO: 7215)
QTPPT,
(SEQ ID NO: 7216)
QYQHA,
(SEQ ID NO: 7217)
QGQQA,
(SEQ ID NO: 7218)
QPPAT,
(SEQ ID NO: 7219)
QERPT,
(SEQ ID NO: 7220)
QDLQT,
(SEQ ID NO: 7221)
QAMHT,
(SEQ ID NO: 7222)
LNQQT,
(SEQ ID NO: 7223)
QHPST,
(SEQ ID NO: 7224)
PGLQT,
(SEQ ID NO: 7225)
QGIRT,
(SEQ ID NO: 7226)
QAPAT,
(SEQ ID NO: 7227)
QSQQI,
(SEQ ID NO: 7228)
QIPPT,
(SEQ ID NO: 7229)
QTQLT,
(SEQ ID NO: 7230)
QAPST,
(SEQ ID NO: 7231)
QNTYA,
(SEQ ID NO: 7232)
QNQHI,
(SEQ ID NO: 7233)
QNHLT,
(SEQ ID NO: 7234)
QIGMT,
(SEQ ID NO: 7235)
LNKQT,
(SEQ ID NO: 7236)
QLQQT,
(SEQ ID NO: 7237)
QRMST,
(SEQ ID NO: 7238)
QGILT,
(SEQ ID NO: 7239)
QDRQT,
(SEQ ID NO: 7240)
RDWQT,
(SEQ ID NO: 7241)
QNTHD,
(SEQ ID NO: 7242)
PNLQI,
(SEQ ID NO: 7243)
QERST,
(SEQ ID NO: 7244)
QNYQT,
(SEQ ID NO: 7245)
QRTCT,
(SEQ ID NO: 7246)
QIGHT,
(SEQ ID NO: 7247)
QGAIT,
(SEQ ID NO: 7248)
QVPPT,
(SEQ ID NO: 7249)
QVQQI,
(SEQ ID NO: 7250)
LMRQT,
(SEQ ID NO: 7251)
QYSVT,
(SEQ ID NO: 7252)
QAITT,
(SEQ ID NO: 7253)
QKTLT,
(SEQ ID NO: 7254)
QNQWT,
(SEQ ID NO: 7255)
QLHHT,
(SEQ ID NO: 7256)
QNIII,
(SEQ ID NO: 7257)
QGHHT,
(SEQ ID NO: 7258)
QSKVT,
(SEQ ID NO: 7259)
QLPST,
(SEQ ID NO: 7260)
IGKQT,
(SEQ ID NO: 7261)
QAIHT,
(SEQ ID NO: 7262)
QHGLT,
(SEQ ID NO: 7263)
QFMCT,
(SEQ ID NO: 7264)
QHLQT,
(SEQ ID NO: 7265)
QNHQN,
(SEQ ID NO: 7266)
QPART,
(SEQ ID NO: 7267)
QSLQT,
(SEQ ID NO: 7268)
QSQLT,
(SEQ ID NO: 7269)
QDRQS,
(SEQ ID NO: 7270)
QMPST,
(SEQ ID NO: 7271)
QGSLT,
(SEQ ID NO: 7272)
QVPAT,
(SEQ ID NO: 7273)
QDKQT,
(SEQ ID NO: 7274)
HYQQT,
(SEQ ID NO: 7275)
QVPST,
(SEQ ID NO: 7276)
RGEQT,
(SEQ ID NO: 7277)
PGQQT,
(SEQ ID NO: 7278)
QSLQI,
(SEQ ID NO: 7279)
LEQQT,
(SEQ ID NO: 7280)
QNQST,
(SEQ ID NO: 7281)
QKVIT,
(SEQ ID NO: 7282)
QNNDQ,
(SEQ ID NO: 7283)
QSVHT,
(SEQ ID NO: 7284)
QPLGT,
(SEQ ID NO: 7285)
HNQET,
(SEQ ID NO: 7286)
QNLQI,
(SEQ ID NO: 7287)
QIQQT,
(SEQ ID NO: 7288)
QVRNT,
(SEQ ID NO: 7289)
PSNQT,
(SEQ ID NO: 7290)
QVGHT,
(SEQ ID NO: 7291)
QRDIT,
(SEQ ID NO: 7292)
QMPNT,
(SEQ ID NO: 7293)
RGLQT,
(SEQ ID NO: 7294)
QKQQT,
(SEQ ID NO: 7295)
PSLQT,
(SEQ ID NO: 7296)
QRDQT,
(SEQ ID NO: 7297)
QAKGT,
(SEQ ID NO: 7298)
QSAHT,
(SEQ ID NO: 7299)
QSTMT,
(SEQ ID NO: 7300)
QREMT,
(SEQ ID NO: 7301)
QYRAT,
(SEQ ID NO: 7302)
QWQQT,
(SEQ ID NO: 7303)
QRMNT,
(SEQ ID NO: 7304)
GDSQT,
(SEQ ID NO: 7305)
QKIST,
(SEQ ID NO: 7306)
PSMQT,
(SEQ ID NO: 7307)
SPRQT,
(SEQ ID NO: 7308)
MEQQT,
(SEQ ID NO: 7309)
QYQNT,
(SEQ ID NO: 7310)
QHQQT,
(SEQ ID NO: 7311)
INQQT,
(SEQ ID NO: 7312)
PNQQH,
(SEQ ID NO: 7313)
ENRQT,
(SEQ ID NO: 7314)
QTQQA,
or
(SEQ ID NO: 7315)
QNQAT;

[0108] (ii) an amino acid sequence comprising any portion of an amino acid sequence in (i), e.g., any 2, 3, or 4 amino acids, e.g., consecutive amino acids, thereof;
[0109] (iii) an amino acid sequence comprising one, two, or three but no more than four modifications, e.g., substitutions (e.g., conservative substitutions), insertions, or deletions, relative to any of the amino acid sequences in (i); or
[0110] (iv) an amino acid sequence comprising one, two, or three but no more than four different amino acids, relative to any one of the amino acid sequences in (i).
   155. The AAV particle of embodiment 153 or 154, wherein [N1]-[N2]-[N3]-[N4] is or comprises:
[0111] (i) the amino acid sequence of any of SEQ ID NOs: 200 or 2887-3076;
[0112] (ii) an amino acid sequence comprising any portion of an amino acid sequence in (i), e.g., any 2, 3, 4, 5, 6, 7, 8, 9, 10, 11, 12, or 13 amino acids, e.g., consecutive amino acids, thereof;
[0113] (iii) an amino acid sequence comprising one, two, or three but no more than four modifications, e.g., substitutions (e.g., conservative substitutions), insertions, or deletions, relative to any of the amino acid sequences in (i); or
[0114] (iv) an amino acid sequence comprising one, two, or three but no more than four different amino acids, relative to any one of the amino acid sequences in (i).
   156. The AAV particle of any one of embodiments 153-155, wherein [N1]-[N2]-[N3]-[N4] is or comprises GSGSPHSKAQNQQT (SEQ ID NO: 200).
   157. The AAV particle of any one of embodiments 153-155, wherein [N1]-[N2]-[N3]-[N4] is or comprises VSGSPHSKAQNQQT (SEQ ID NO: 903).
   158. The AAV particle of any one of embodiments 130-157, wherein the AAV capsid variant comprises an amino acid other than K at position 449 (e.g., T, E, or N), T at position 450 (e.g., S, E, A, N, V, Q, or G), an amino acid other than I at position 451 (e.g., F, E, V, L, D, S, C, T, A, N, H, R, G, or W), and/or an amino acid other than N at position 452 (e.g., I, P, K, R, H, S, M, Q, D, T, L, A, Y, V, F, E, W, or G), relative to a reference sequence numbered according to SEQ ID NO: 138.
   159. The AAV particle of any one of embodiments 130-157, wherein the AAV capsid variant comprises the amino acid K at position 449, the amino acid T at position 450, the amino acid I at position 451, and/or the amino acid N at position 452, relative to a reference sequence numbered according to SEQ ID NO: 138 or 981.
   160. The AAV particle of any one of embodiments 130-159, wherein the AAV capsid variant further comprises [N0], wherein [N0] comprises X_{A}, X_{B}, X_{C}, and X_{D}, wherein:
[0115] (a) X_{A} is K, T, E, or N;
[0116] (b) X_{b} is T, S, E, A, N, V, Q, or G;
[0117] (c) X_{C} is I, F, E, V, L, D, S, C, T, A, N, H, R, G, or W; and
[0118] (d) X_{D} is N, I, P, K, R, H, S, M, Q, D, T, L, A, Y, V, F, E, W, or G;
[0119] optionally wherein the AAV capsid variant comprises an amino acid modification, e.g., a conservative substitution, of any of the aforesaid amino acids in (a)-(d).
   161. The AAV article of embodiment 160, wherein [N0] is or comprises:

(i)
(SEQ ID NO: 7316)
KTII,
(SEQ ID NO: 7317)
KTFP,
(SEQ ID NO: 7318)
KTEK,
(SEQ ID NO: 7319)
KTVN,
(SEQ ID NO: 7320)
KTFN,
(SEQ ID NO: 7321)
KTIN,
(SEQ ID NO: 7322)
TTIN,
(SEQ ID NO: 7323)
KSIN,
(SEQ ID NO: 7324)
KTER,
(SEQ ID NO: 7325)
KELH,
(SEQ ID NO: 7326)
KAIN,
(SEQ ID NO: 7327)
KTDN,
(SEQ ID NO: 7328)
KTFH,
(SEQ ID NO: 7329)
KTSN,
(SEQ ID NO: 7330)
ETIN,
(SEQ ID NO: 7331)
NTIN,
(SEQ ID NO: 7332)
KTEN,
(SEQ ID NO: 7333)
KTSS,
(SEQ ID NO: 7334)
KTCN,
(SEQ ID NO: 7335)
KTEH,
(SEQ ID NO: 7336)
KAEM,
(SEQ ID NO: 7337)
KATN,
(SEQ ID NO: 7338)
KAIK,
(SEQ ID NO: 7339)
KTDK,
(SEQ ID NO: 7340)
KTFK,
(SEQ ID NO: 7341)
KSDQ,
(SEQ ID NO: 7342)
KTEI,
(SEQ ID NO: 7343)
KTID,
(SEQ ID NO: 7344)
KNTN,
(SEQ ID NO: 7345)
KTET,
(SEQ ID NO: 7346)
KTEL,
(SEQ ID NO: 7347)
KNIN,
(SEQ ID NO: 7348)
KTEA,
(SEQ ID NO: 7349)
KTAN,
(SEQ ID NO: 7350)
NTIY,
(SEQ ID NO: 7351)
KTFS,
(SEQ ID NO: 7352)
KTES,
(SEQ ID NO: 7353)
KTTN,
(SEQ ID NO: 7354)
KTED,
(SEQ ID NO: 7355)
KTNN,
(SEQ ID NO: 7356)
KEVH,
(SEQ ID NO: 7357)
KTIS,
(SEQ ID NO: 7358)
KTVR,
(SEQ ID NO: 7359)
KTDR,
(SEQ ID NO: 7360)
ETIK,
(SEQ ID NO: 7361)
KNHI,
(SEQ ID NO: 7362)
KESD,
(SEQ ID NO: 7363)
KTIK,
(SEQ ID NO: 7364)
KTDL,
(SEQ ID NO: 7365)
KTVP,
(SEQ ID NO: 7366)
KTVI,
(SEQ ID NO: 7367)
KAEH,
(SEQ ID NO: 7368)
KNCL,
(SEQ ID NO: 7369)
KTVK,
(SEQ ID NO: 7370)
KNAD,
(SEQ ID NO: 7371)
KTIT,
(SEQ ID NO: 7372)
KNCV,
(SEQ ID NO: 7373)
KNAL,
(SEQ ID NO: 7374)
KVIN,
(SEQ ID NO: 7375)
KTEF,
(SEQ ID NO: 7376)
KTRE,
(SEQ ID NO: 7377)
KQGE,
(SEQ ID NO: 7378)
KSEK,
(SEQ ID NO: 7379)
KNVN,
(SEQ ID NO: 7380)
KGGE,
(SEQ ID NO: 7381)
KEFV,
(SEQ ID NO: 7382)
KSDK,
(SEQ ID NO: 7383)
KTEQ,
(SEQ ID NO: 7384)
KEVQ,
(SEQ ID NO: 7385)
KTEY,
(SEQ ID NO: 7386)
KNCW,
(SEQ ID NO: 7387)
KTDV,
(SEQ ID NO: 7388)
KSDI,
(SEQ ID NO: 7389)
KNSI,
(SEQ ID NO: 7390)
KNSL,
(SEQ ID NO: 7391)
KEVV,
(SEQ ID NO: 7392)
KTEP,
(SEQ ID NO: 7393)
KSEL,
(SEQ ID NO: 7394)
KTWQ,
(SEQ ID NO: 7395)
KTEV,
(SEQ ID NO: 7396)
KAVN,
(SEQ ID NO: 7397)
KGVL,
(SEQ ID NO: 7398)
KTEG,
(SEQ ID NO: 7399)
KTRD,
(SEQ ID NO: 7400)
KTGN,
(SEQ ID NO: 7401)
KNAI,
(SEQ ID NO: 7402)
KAEN,
(SEQ ID NO: 7403)
KAET,
(SEQ ID NO: 7404)
KTVH,
(SEQ ID NO: 7405)
KETA,
(SEQ ID NO: 7406)
KNNL,
(SEQ ID NO: 7407)
EAIN,
(SEQ ID NO: 7408)
KSLN,
(SEQ ID NO: 7409)
KTIP,
or
(SEQ ID NO: 7410)
KTIH;

[0120] (ii) an amino acid sequence comprising any portion of an amino acid sequence in (i), e.g., any 2, or 3 amino acids, e.g., consecutive amino acids, thereof;
[0121] (iii) an amino acid sequence comprising one, two, or three but no more than four modifications, e.g., substitutions (e.g., conservative substitutions), insertions, or deletions, relative to any of the amino acid sequences in (i); or
[0122] (iv) an amino acid sequence comprising one, two, or three but no more than four different amino acids, relative to any one of the amino acid sequences in (i).
   162. The AAV particle of embodiment 160 or 161, wherein [N0]-[N1]-[N2]-[N3]-[N4] is or comprises:
[0123] (i) the amino acid sequence of any one of SEQ ID NOs: 3239-3526 or 3591-3605;
[0124] (ii) an amino acid sequence comprising any portion of an amino acid sequence in (i), e.g., any 2, 3, 4, 5, 6, 7, 8, 9, 10, 11, 12, 13, 14, 15, 16, or 17 amino acids, e.g., consecutive amino acids, thereof;
[0125] (iii) an amino acid sequence comprising one, two, or three but no more than four modifications, e.g., substitutions (e.g., conservative substitutions), insertions, or deletions, relative to any of the amino acid sequences in (i); or
[0126] (iv) an amino acid sequence comprising one, two, or three but no more than four different amino acids, relative to any one of the amino acid sequences in (i).
   163. The AAV particle of any one of embodiments 160-162, wherein [N0]-[N1]-[N2]-[N3]-[N4] is or comprises KTINGSGSPHSKAQNQQT (SEQ ID NO: 7411).
   164. The AAV particle of any one of embodiments 160-162, wherein [N0]-[N1]-[N2]-[N3]-[N4] is or comprises KTERVSGSPHSKAQNQQT (SEQ ID NO: 3589).
   165. An AAV particle comprising an AAV capsid variant and a nucleic acid comprising a transgene encoding an antibody molecule which binds to HER2/neu (e.g., human HER2/neu), wherein the AAV capsid variant comprises an amino acid sequence having the following formula: [N1]-[N2]-[N3], wherein:
[0127] (i) [N1] comprises positions X1, X2, and X3, wherein position X2 is an amino acid other than S and position X3 is an amino acid other than G;
[0128] (ii) [N2] comprises the amino acid sequence SPH; and
[0129] (iii) [N3] comprises positions X4, X5, and X6, wherein position X4 is K.
   166. The AAV particle of embodiment 165, wherein:
[0130] (i) X5 of [N3] is S, I, T, R, H, Y, L, or M; and
[0131] (ii) X6 of [N3] is G, A, L, E, V, R, W, N, Q, or K;
[0132] optionally wherein the AAV capsid variant comprises an amino acid modification, e.g., a conservative substitution, of any of the aforesaid amino acids in (i) or (ii).
   167. The AAV particle of embodiment 165 or 166, wherein X5 is S and/or X₆ is G.
   168. The AAV particle of any one of embodiments 165-167, wherein [N3] comprises KS, KI, KT, KR, KH, KY, KL, KM, SG, IG, TG, RG, SA, SL, SE, SV, SR, SW, SN, HG, YG, SQ, IV, SK, LW, MG, or MA.
   169. The AAV particle of any one of embodiments 165-168, wherein [N3] is or comprises KSG, KIG, KTG, KRG, KSA, KSL, KSE, KSV, KSR, KSW, KSN, KHG, KYG, KSQ, KIV, KSK, KLW, KMG, or KMA.
   170. The AAV particle of any one of embodiments 165-169, wherein [N3] is or comprises KSG.
   171. The AAV particle of any one of embodiments 165-170, wherein [N2]-[N3] comprises SPHKS (SEQ ID NO: 6620), SPHKI (SEQ ID NO: 6629), SPHKT (SEQ ID NO: 6627), SPHKR (SEQ ID NO: 6633), NPHKS (SEQ ID NO: 7412), SPHKH (SEQ ID NO: 6644), SPHKY (SEQ ID NO: 6631), SPHKL (SEQ ID NO: 6630), or SPHKM (SEQ ID NO: 6645).
   172. The AAV particle of any one of embodiments 165-171, wherein [N2]-[N3] is or comprises:

(i)
(SEQ ID NO: 946)
SPHKSG,
(SEQ ID NO: 958)
SPHKIG,
(SEQ ID NO: 6654)
SPHKTG,
(SEQ ID NO: 974)
SPHKRG,
(SEQ ID NO: 7413)
NPHKSG,
(SEQ ID NO: 977)
SPHKSA,
(SEQ ID NO: 6656)
SPHKSL,
(SEQ ID NO: 6657)
SPHKSE,
(SEQ ID NO: 6658)
SPHKSV,
(SEQ ID NO: 951)
SPHKSR,
(SEQ ID NO: 6659)
SPHKSW,
(SEQ ID NO: 6660)
SPHKSN,
(SEQ ID NO: 6661)
SPHKHG,
(SEQ ID NO: 966)
SPHKYG,
(SEQ ID NO: 6662)
SPHKSQ,
(SEQ ID NO: 7414)
SPHKIV,
(SEQ ID NO: 6663)
SPHKSK,
(SEQ ID NO: 6664)
SPHKLW,
(SEQ ID NO: 6666)
SPHKMG,
or
(SEQ ID NO: 6667)
SPHKMA;

[0133] (ii) an amino acid sequence comprising any portion of an amino acid sequence in (i), e.g., any 2, 3, 4, or 5 amino acids, e.g., consecutive amino acids, thereof;
[0134] (iii) an amino acid sequence comprising one, two, or three but no more than four modifications, e.g., substitutions (e.g., conservative substitutions), insertions, or deletions, relative to any of the amino acid sequences in (i); or
[0135] (iv) an amino acid sequence comprising one, two, or three but no more than four different amino acids, relative to any one of the amino acid sequences in (i).
   173. The AAV particle of any one of embodiments 165-172, wherein [N2]-[N3] is or comprises SPHKSG (SEQ ID NO: 946).
   174. The AAV particle of any one of embodiments 165-173, wherein the AAV capsid variant comprises an amino acid other than G at position 453 (e.g., A, K, W, R, L, I, M, N, T, E, Q, Y, H, F, or V), numbered according to SEQ ID NO: 138 or 981.
   175. The AAV particle of any one of embodiments 165-173, wherein the AAV capsid variant comprises the amino acid G at position 453, numbered according to SEQ ID NO: 138 or 981.
   176. The AAV particle of any one of embodiments 165-175, wherein:
[0136] (i) position X1 of [N1] is G, A, K, W, R, L, I, M, N, T, E, Q, Y, H, F, or V;
[0137] (ii) position X2 of [N1] is H, Y, R, Q, N, P, or D;
[0138] (iii) position X3 of [N1] is D, E, G, V, or N;
[0139] optionally wherein the AAV capsid variant comprises an amino acid modification, e.g., a conservative substitution, of any of the aforesaid amino acids in (i), (ii), or (iii).
   177. The AAV particle of any one of embodiments 165-176, wherein position X2 of [N1] is H and position X3 of [N1] is D.
   178. The AAV particle of any one of embodiments 165-177, wherein position X1 of [N1] is G, position X2 of [N1] is H and position X3 of [N1] is D.
   179. The AAV particle of any one of embodiments 165-178, wherein [N1] comprises GH, HD, GY, GR, GQ, AH, GN, KH, GP, WH, RH, LH, IH, MH, GD, NH, TH, EH, QH, YH, HH, FH, VH, YD, HE, RG, QD, RD, ND, PD, QV, DD, HN, or NG 180. The AAV particle of any one of embodiments 165-179, wherein [N1] is or comprises GHD, GYD, GHE, GRG, GQD, GRD, AHD, GND, KHD, GPD, WHD, RHD, LHD, GQV, IHD, MHD, GDD, GHN, NHD, THD, GNG, EHD, QHD, YHD, HHD, FHD, or VHD.
   181. The AAV particle of any one of embodiments 165-180, wherein [N1] is or comprises GHD.
   182. The AAV particle of any one of embodiments 165-181, wherein [N1]-[N2] comprises HDSPH (SEQ ID NO: 6619).
   183. The AAV particle of any one of embodiments 165-182, wherein [N1]-[N2] is or comprises:

(i)
(SEQ ID NO: 6701)
GHDSPH,
(SEQ ID NO: 6746)
GYDSPH,
(SEQ ID NO: 6710)
GHESPH,
(SEQ ID NO: 6705)
GRGSPH,
(SEQ ID NO: 7415)
GHDNPH,
(SEQ ID NO: 6702)
GQDSPH,
(SEQ ID NO: 6748)
GRDSPH,
(SEQ ID NO: 7416)
AHDSPH,
(SEQ ID NO: 6749)
GNDSPH,
(SEQ ID NO: 7417)
KHDSPH,
(SEQ ID NO: 6750)
GPDSPH,
(SEQ ID NO: 7418)
WHDSPH,
(SEQ ID NO: 7419)
RHDSPH,
(SEQ ID NO: 7420)
LHDSPH,
(SEQ ID NO: 6752)
GQVSPH,
(SEQ ID NO: 7421)
IHDSPH,
(SEQ ID NO: 7422)
MHDSPH,
(SEQ ID NO: 6709)
GDDSPH,
(SEQ ID NO: 6753)
GHNSPH,
(SEQ ID NO: 7423)
NHDSPH,
(SEQ ID NO: 7424)
THDSPH,
(SEQ ID NO: 6722)
GNGSPH,
(SEQ ID NO: 7425)
EHDSPH,
(SEQ ID NO: 7426)
QHDSPH,
(SEQ ID NO: 7427)
YHDSPH,
(SEQ ID NO: 7428)
HHDSPH,
(SEQ ID NO: 7429)
FHDSPH,
or
(SEQ ID NO: 7430)
VHDSPH;

[0140] (ii) an amino acid sequence comprising any portion of an amino acid sequence in (i), e.g., any 2, 3, 4, or 5 amino acids, e.g., consecutive amino acids, thereof;
[0141] (iii) an amino acid sequence comprising one, two, or three but no more than four modifications, e.g., substitutions (e.g., conservative substitutions), insertions, or deletions, relative to any of the amino acid sequences in (i); or
[0142] (iv) an amino acid sequence comprising one, two, or three but no more than four different amino acids, relative to any one of the amino acid sequences in (i).
   184. The AAV particle of any one of embodiments 165-183, wherein [N1]-[N2]-[N3] is or comprises:

(i)
(SEQ ID NO: 6615)
GHDSPHKSG,
(SEQ ID NO: 6913)
GHDSPHKIG,
(SEQ ID NO: 6914)
GYDSPHKSG,
(SEQ ID NO: 6915)
GHESPHKSG,
(SEQ ID NO: 6916)
GHDSPHKTG,
(SEQ ID NO: 6917)
GRGSPHKRG,
(SEQ ID NO: 7431)
GHDNPHKSG,
(SEQ ID NO: 6825)
GQDSPHKSG,
(SEQ ID NO: 6857)
GHDSPHKSA,
(SEQ ID NO: 6918)
GHDSPHKSL,
(SEQ ID NO: 6920)
GHDSPHKSE,
(SEQ ID NO: 6921)
GRDSPHKSG,
(SEQ ID NO: 7432)
AHDSPHKSG,
(SEQ ID NO: 6922)
GNDSPHKSV,
(SEQ ID NO: 7433)
AHDSPHKIG,
(SEQ ID NO: 6856)
GHESPHKSA,
(SEQ ID NO: 6923)
GQDSPHKIG,
(SEQ ID NO: 6924)
GHDSPHKSV,
(SEQ ID NO: 6859)
GHDSPHKSR,
(SEQ ID NO: 7434)
KHDSPHKSG,
(SEQ ID NO: 6925)
GPDSPHKIG,
(SEQ ID NO: 6926)
GPDSPHKSG,
(SEQ ID NO: 6927)
GHDSPHKSW,
(SEQ ID NO: 7435)
WHDSPHKSG,
(SEQ ID NO: 7436)
RHDSPHKSG,
(SEQ ID NO: 6928)
GHDSPHKSN,
(SEQ ID NO: 6854)
GHDSPHKRG,
(SEQ ID NO: 6930)
GHDSPHKHG,
(SEQ ID NO: 7437)
LHDSPHKSG,
(SEQ ID NO: 6931)
GQVSPHKSG,
(SEQ ID NO: 7438)
IHDSPHKSG,
(SEQ ID NO: 7439)
MHDSPHKSG,
(SEQ ID NO: 6932)
GDDSPHKSV,
(SEQ ID NO: 6933)
GHNSPHKSG,
(SEQ ID NO: 7440)
NHDSPHKSG,
(SEQ ID NO: 7441)
THDSPHKSG,
(SEQ ID NO: 6934)
GNGSPHKRG,
(SEQ ID NO: 7442)
EHDSPHKSG,
(SEQ ID NO: 6935)
GHDSPHKYG,
(SEQ ID NO: 6936)
GHDSPHKSQ,
(SEQ ID NO: 7443)
QHDSPHKSG,
(SEQ ID NO: 7444)
RHDSPHKIV,
(SEQ ID NO: 7445)
YHDSPHKSG,
(SEQ ID NO: 6937)
GNDSPHKIG,
(SEQ ID NO: 7446)
HHDSPHKSG,
(SEQ ID NO: 6938)
GHDSPHKSK,
(SEQ ID NO: 7447)
FHDSPHKSG,
(SEQ ID NO: 6939)
GHDSPHKLW,
(SEQ ID NO: 7448)
VHDSPHKSG,
(SEQ ID NO: 6941)
GHDSPHKMG,
(SEQ ID NO: 6942)
GHDSPHKMA,
or
(SEQ ID NO: 6855)
GDDSPHKSG;

[0143] (ii) an amino acid sequence comprising any portion of an amino acid sequence in (i), e.g., any 2, 3, 4, 5, 6, 7, 8, or 9 amino acids, e.g., consecutive amino acids, thereof;
[0144] (iii) an amino acid sequence comprising one, two, or three but no more than four modifications, e.g., substitutions (e.g., conservative substitutions), insertions, or deletions, relative to any of the amino acid sequences in (i); or
[0145] (iv) an amino acid sequence comprising one, two, or three but no more than four different amino acids, relative to any one of the amino acid sequences in (i).
   185. The AAV particle of any one of embodiments 165-184, wherein [N1]-[N2]-[N3] is or comprises GHDSPHKSG (SEQ ID NO: 6615).
   186. The AAV particle of any one of embodiments 165-185, wherein the AAV capsid variant comprises an amino acid other than Q at position 456 (e.g., R, P, H, K, L, V, A, E, or I), an amino acid other than N at position 457 (e.g., I, K, S, H, R, T, D, Y, L, W, F, A, Q, or M), an amino acid other than Q at position 458 (e.g., R, V, K, P, Y, H, L, I, E, or M), an amino acid other than Q at position 459 (e.g., H, L, E, P, W, D, I, V, S, K, R, C, M, or N), and/or an amino acid other than T at position 460 (e.g., A, E, K, S, I, P, G, or N), relative to a reference sequence numbered according to SEQ ID NO: 138.
   187. The AAV particle of any one of embodiments 165-186, wherein the AAV capsid variant comprises an amino acid other than Q at position 462 (e.g., R, P, H, K, L, V, A, E, or I), an amino acid other than N at position 463 (e.g., I, K, S, H, R, T, D, Y, L, W, F, A, Q, or M), an amino acid other than Q at position 464 (e.g., R, V, K, P, Y, H, L, I, E, or M), an amino acid other than Q at position 465 (e.g., H, L, E, P, W, D, I, V, S, K, R, C, M, or N), and/or an amino acid other than T at position 466 (e.g., A, E, K, S, I, P, G, or N), relative to a reference sequence numbered according to SEQ ID NO: 982.
   188. The AAV particle of any one of embodiments 165-187, wherein the AAV capsid variant comprises the amino acid Q at position 456, the amino acid N at position 457, the amino acid Q at position 458, the amino acid Q at position 459, and/or the amino acid T at position 460, relative to a reference sequence numbered according to SEQ ID NO: 138.
   189. The AAV particle of any one of embodiments 165-188, wherein the AAV capsid variant comprises the amino acid Q at position 462, the amino acid N at position 463, the amino acid Q at position 464, the amino acid Q at position 465, and/or the amino acid T at position 466, relative to a reference sequence numbered according to SEQ ID NO: 982.
   190. The AAV particle of any one of embodiments 165-189, wherein the AAV capsid variant further comprises [N4] wherein [N4] comprises X7, X8, X9, X10, and X11, wherein:
[0146] (a) X7 is Q, R, P, H, L, K, I, G, S, M, or E;
[0147] (b) X8 is N, D, V, S, P, T, G, Y, W, E, R, H, K, F, A, I, L, or M;
[0148] (c) X9 is Q, R, L, A, P, H, T, I, F, K, V, M, G, W, Y, S, E, N, D;
[0149] (d) X10 is Q, H, K, A, L, P, E, M, I, S, N, R, Y, C, V, T, W, D, G; and
[0150] (e) X11 is T, I, N, S, H, R, L, D, Y, A, Q;
[0151] optionally wherein the AAV capsid variant comprises an amino acid modification, e.g., a conservative substitution, of any of the aforesaid amino acids in (a)-(e).
   191. The AAV particle of embodiment 190, wherein [N4] is or comprises:

(i)
(SEQ ID NO: 7163)
QNQQT,
(SEQ ID NO: 7449)
QIRQT,
(SEQ ID NO: 7450)
QNQHA,
(SEQ ID NO: 7294)
QKQQT,
(SEQ ID NO: 7451)
QSVQT,
(SEQ ID NO: 7452)
RSQQT,
(SEQ ID NO: 7453)
QNKLE,
(SEQ ID NO: 7454)
QNQQK,
(SEQ ID NO: 7455)
QHQQA,
(SEQ ID NO: 7456)
QIQHT,
(SEQ ID NO: 7457)
PRQQT,
(SEQ ID NO: 7458)
HTQQT,
(SEQ ID NO: 7459)
QRQHT,
(SEQ ID NO: 7169)
QSQQT,
(SEQ ID NO: 7460)
QNQQS,
(SEQ ID NO: 7461)
RNQET,
(SEQ ID NO: 7229)
QTQLT,
(SEQ ID NO: 7462)
KNQQT,
(SEQ ID NO: 7183)
QDQQT,
(SEQ ID NO: 7177)
HNQQT,
(SEQ ID NO: 7174)
QNQLT,
(SEQ ID NO: 7463)
QTQQT,
(SEQ ID NO: 7464)
QTQQI,
(SEQ ID NO: 7465)
QSKQA,
(SEQ ID NO: 7466)
QNQPP,
(SEQ ID NO: 7467)
QSPQT,
(SEQ ID NO: 7244)
QNYQT,
(SEQ ID NO: 7182)
QNHQT,
(SEQ ID NO: 7197)
QNRQT,
(SEQ ID NO: 7468)
QNQQG,
(SEQ ID NO: 7233)
QNHLT,
(SEQ ID NO: 7198)
QYQHT,
(SEQ ID NO: 7254)
QNQWT,
(SEQ ID NO: 7469)
QNQHT,
(SEQ ID NO: 7470)
QTRQT,
(SEQ ID NO: 7471)
QNLHT,
(SEQ ID NO: 7222)
LNQQT,
(SEQ ID NO: 7472)
QNQET,
(SEQ ID NO: 7264)
QHLQT,
(SEQ ID NO: 7473)
LNQPT,
(SEQ ID NO: 7474)
QNQDT,
(SEQ ID NO: 7475)
RNQQT,
(SEQ ID NO: 7476)
QNLLT,
(SEQ ID NO: 7477)
QLVIT,
(SEQ ID NO: 7478)
RTQET,
(SEQ ID NO: 7479)
QTHQT,
(SEQ ID NO: 7480)
QNQPA,
(SEQ ID NO: 7481)
QDQHT,
(SEQ ID NO: 7482)
QSQHT,
(SEQ ID NO: 7483)
RNQQI,
(SEQ ID NO: 7484)
VRQQT,
(SEQ ID NO: 7485)
QNQHS,
(SEQ ID NO: 7486)
AWQQT,
(SEQ ID NO: 7487)
QSVPT,
(SEQ ID NO: 7488)
QNIQP,
(SEQ ID NO: 7489)
QNHLN,
(SEQ ID NO: 7490)
LDQQT,
(SEQ ID NO: 7491)
PDQQS,
(SEQ ID NO: 7492)
ESQQT,
(SEQ ID NO: 7493)
QNKQT,
(SEQ ID NO: 7494)
QRQLT,
(SEQ ID NO: 7495)
QIIVT,
(SEQ ID NO: 7496)
QKQST,
(SEQ ID NO: 7497)
QSHQT,
(SEQ ID NO: 7498)
QFVVT,
(SEQ ID NO: 7179)
QNLQT,
(SEQ ID NO: 7170)
QNQQI,
(SEQ ID NO: 7499)
QSQPT,
(SEQ ID NO: 7500)
QNEQT,
(SEQ ID NO: 7267)
QSLQT,
(SEQ ID NO: 7501)
RNRQT,
(SEQ ID NO: 7502)
QSKQT,
(SEQ ID NO: 7503)
QNPLT,
(SEQ ID NO: 7504)
RDQKT,
(SEQ ID NO: 7505)
HNQQN,
(SEQ ID NO: 7506)
QWKRT,
(SEQ ID NO: 7227)
QSQQI,
(SEQ ID NO: 7213)
QAQQT,
(SEQ ID NO: 7507)
QNHQI,
(SEQ ID NO: 7508)
QNQQA,
(SEQ ID NO: 7509)
QNQLN,
(SEQ ID NO: 7510)
QTQPT,
(SEQ ID NO: 7311)
INQQT,
(SEQ ID NO: 7511)
QKQLT,
(SEQ ID NO: 7512)
RNQLA,
(SEQ ID NO: 7513)
RNQQS,
(SEQ ID NO: 7514)
ISIQT,
(SEQ ID NO: 7515)
QNQQN,
(SEQ ID NO: 7516)
QSQQS,
(SEQ ID NO: 7517)
QTVCT,
(SEQ ID NO: 7518)
QYQQI,
(SEQ ID NO: 7519)
QQIMT,
(SEQ ID NO: 7520)
QNEQS,
(SEQ ID NO: 7521)
LNHQT,
(SEQ ID NO: 7522)
QMIHT,
(SEQ ID NO: 7523)
RNHQS,
(SEQ ID NO: 7524)
QKMNT,
(SEQ ID NO: 7525)
QSQQN,
(SEQ ID NO: 7216)
QYQHA;

[0152] (ii) an amino acid sequence comprising any portion of an amino acid sequence in (i), e.g., any 2, 3, or 4 amino acids, e.g., consecutive amino acids, thereof;
[0153] (iii) an amino acid sequence comprising one, two, or three but no more than four modifications, e.g., substitutions (e.g., conservative substitutions), insertions, or deletions, relative to any of the amino acid sequences in (i); or
[0154] (iv) an amino acid sequence comprising one, two, or three but no more than four different amino acids, relative to any one of the amino acid sequences in (i).
   192. The AAV particle of embodiment 190 or 191, wherein [N1]-[N2]-[N3]-[N4] is or comprises:
[0155] (i) the amino acid sequence of any of SEQ ID NOs: 201 or 3160-3237;
[0156] (ii) an amino acid sequence comprising any portion of an amino acid sequence in (i), e.g., any 2, 3, 4, 5, 6, 7, 8, 9, 10, 11, 12, or 13 amino acids, e.g., consecutive amino acids, thereof;
[0157] (iii) an amino acid sequence comprising one, two, or three but no more than four modifications, e.g., substitutions (e.g., conservative substitutions), insertions, or deletions, relative to any of the amino acid sequences in (i); or
[0158] (iv) an amino acid sequence comprising one, two, or three but no more than four different amino acids, relative to any one of the amino acid sequences in (i).
   193. The AAV particle of any one of embodiments 190-192, wherein [N1]-[N2]-[N3]-[N4] is or comprises GHDSPHKSGQNQQT (SEQ ID NO: 201).
   194. The AAV particle of any one of embodiments 165-193, wherein the AAV capsid variant comprises an amino acid other than K at position 449 (e.g., T), T at position 450 (e.g., A, S, I, V, N, E, Y, C, G, W, or Q), an amino acid other than I at position 451 (e.g., E, V, S, T, N, D, C, G, Q, L, P, A), and/or an amino acid other than N at position 452 (e.g., S, Y, I, K, F, T, D, E, G, V, L, A, M, Q, H, P, or R), relative to a reference sequence numbered according to SEQ ID NO: 138 or 982.
   195. The AAV particle of any one of embodiments 165-193, wherein the AAV capsid variant comprises the amino acid K at position 449, the amino acid T at position 450, the amino acid I at position 451, and/or the amino acid N at position 452, relative to a reference sequence numbered according to SEQ ID NO: 138.
   196. The AAV particle of any one of embodiments 165-195, wherein the AAV capsid variant further comprises [N0], wherein [N0] comprises X_{A}, X_{B}, X_{C}, and X_{D}, wherein:
[0159] (a) X_{A} is K or T;
[0160] (b) X_{b} is T, A, S, I, V, N, E, Y, C, G, W, or Q;
[0161] (c) X_{C} is I, E, V, S, T, N, D, C, G, Q, L, P, A; and
[0162] (d) X_{D} is N, S, Y, I, K, F, T, D, E, G, V, L, A, M, Q, H, P, or R;
[0163] optionally wherein the AAV capsid variant comprises an amino acid modification, e.g., a conservative substitution, of any of the aforesaid amino acids in (a)-(d).
   197. The AAV particle of embodiment 196, wherein [N0] is or comprises:

(i)
(SEQ ID NO: 7326)
KAIN,
(SEQ ID NO: 7321)
KTIN,
(SEQ ID NO: 7352)
KTES,
(SEQ ID NO: 7322)
TTIN,
(SEQ ID NO: 7323)
KSIN,
(SEQ ID NO: 7319)
KTVN,
(SEQ ID NO: 7526)
KSIY,
(SEQ ID NO: 7329)
KTSN,
(SEQ ID NO: 7353)
KTTN,
(SEQ ID NO: 7527)
KIIN,
(SEQ ID NO: 7357)
KTIS,
(SEQ ID NO: 7528)
KAII,
(SEQ ID NO: 7363)
KTIK,
(SEQ ID NO: 7375)
KTEF,
(SEQ ID NO: 7371)
KTIT,
(SEQ ID NO: 7355)
KTNN,
(SEQ ID NO: 7343)
KTID,
(SEQ ID NO: 7529)
KAIS,
(SEQ ID NO: 7530)
KTVD,
(SEQ ID NO: 7531)
KTIE,
(SEQ ID NO: 7398)
KTEG,
(SEQ ID NO: 7374)
KVIN,
(SEQ ID NO: 7396)
KAVN,
(SEQ ID NO: 7532)
KTIY,
(SEQ ID NO: 7327)
KTDN,
(SEQ ID NO: 7334)
KTCN,
(SEQ ID NO: 7533)
KNVV,
(SEQ ID NO: 7346)
KTEL,
(SEQ ID NO: 7534)
KTDA,
(SEQ ID NO: 7395)
KTEV,
(SEQ ID NO: 7393)
KSEL,
(SEQ ID NO: 7535)
KTEM,
(SEQ ID NO: 7383)
KTEQ,
(SEQ ID NO: 7316)
KTII,
(SEQ ID NO: 7536)
KIVN,
(SEQ ID NO: 7318)
KTEK,
(SEQ ID NO: 7332)
KTEN,
(SEQ ID NO: 7537)
KIGN,
(SEQ ID NO: 7538)
KEVM,
(SEQ ID NO: 7539)
KYQV,
(SEQ ID NO: 7348)
KTEA,
(SEQ ID NO: 7337)
KATN,
(SEQ ID NO: 7335)
KTEH,
(SEQ ID NO: 7540)
KTVE,
(SEQ ID NO: 7541)
KAID,
(SEQ ID NO: 7542)
KTIM,
(SEQ ID NO: 7543)
KEVG,
(SEQ ID NO: 7544)
KSEM,
(SEQ ID NO: 7545)
KAQQ,
(SEQ ID NO: 7546)
KCGE,
(SEQ ID NO: 7547)
KASN,
(SEQ ID NO: 7345)
KTET,
(SEQ ID NO: 7548)
KTIG,
(SEQ ID NO: 7549)
KTDP,
(SEQ ID NO: 7550)
KELV,
(SEQ ID NO: 7551)
KELM,
(SEQ ID NO: 7552)
KNEI,
(SEQ ID NO: 7553)
KTPN,
(SEQ ID NO: 7554)
KITN,
(SEQ ID NO: 7555)
KTDI,
(SEQ ID NO: 7556)
KTDQ,
(SEQ ID NO: 7557)
KGIN,
(SEQ ID NO: 7558)
KSEI,
(SEQ ID NO: 7378)
KSEK,
(SEQ ID NO: 7559)
KWSA,
(SEQ ID NO: 7560)
KELA,
(SEQ ID NO: 7561)
KQTQ,
(SEQ ID NO: 7562)
KGAD,
(SEQ ID NO: 7563)
KVGE,
(SEQ ID NO: 7564)
KANE,
(SEQ ID NO: 7565)
KTDT,
(SEQ ID NO: 7566)
KTCI,
(SEQ ID NO: 7567)
KELR,
(SEQ ID NO: 7568)
KCQI,
(SEQ ID NO: 7569)
KGVM,
(SEQ ID NO: 7570)
KACD,
(SEQ ID NO: 7571)
KNEL,
(SEQ ID NO: 7572)
KAAE,
(SEQ ID NO: 7573)
KGQN,
(SEQ ID NO: 7574)
KNEF,
(SEQ ID NO: 7575)
KTSI,
(SEQ ID NO: 7367)
KAEH,
(SEQ ID NO: 7576)
KCDQ,
(SEQ ID NO: 7577)
KEIL,
(SEQ ID NO: 7324)
KTER,
(SEQ ID NO: 7401)
KNAI,
(SEQ ID NO: 7339)
KTDK,
(SEQ ID NO: 7578)
KTPD,
(SEQ ID NO: 7410)
KTIH,
or
(SEQ ID NO: 7342)
KTEI;

[0164] (ii) an amino acid sequence comprising any portion of an amino acid sequence in (i), e.g., any 2, or 3 amino acids, e.g., consecutive amino acids, thereof;
[0165] (iii) an amino acid sequence comprising one, two, or three but no more than four modifications, e.g., substitutions (e.g., conservative substitutions), insertions, or deletions, relative to any of the amino acid sequences in (i); or
[0166] (iv) an amino acid sequence comprising one, two, or three but no more than four different amino acids, relative to any one of the amino acid sequences in (i).
   198. The AAV particle of embodiment 196 or 197, wherein [N0]-[N1]-[N2]-[N3]-[N4] is or comprises:
[0167] (i) the amino acid sequence of any one of SEQ ID NOs: 3606-3836;
[0168] (ii) an amino acid sequence comprising any portion of an amino acid sequence in (i), e.g., any 2, 3, 4, 5, 6, 7, 8, 9, 10, 11, 12, 13, 14, 15, 16, or 17 amino acids, e.g., consecutive amino acids, thereof;
[0169] (iii) an amino acid sequence comprising one, two, or three but no more than four modifications, e.g., substitutions (e.g., conservative substitutions), insertions, or deletions, relative to any of the amino acid sequences in (i); or
[0170] (iv) an amino acid sequence comprising one, two, or three but no more than four different amino acids, relative to any one of the amino acid sequences in (i).
   199. The AAV particle of any one of embodiments 196-198, wherein [N0]-[N1]-[N2]-[N3]-[N4] is or comprises KTINGHDSPHKSGQNQQT (SEQ ID NO: 7579).
   200. The AAV particle of any one of embodiments 196-198, wherein [N0]-[N1]-[N2]-[N3]-[N4] is or comprises KAEIGHDSPHKSGQNQQT (SEQ ID NO: 1754).
   201. The AAV particle of any one of embodiments 196-198, wherein [N0]-[N1]-[N2]-[N3]-[N4] is or comprises KTEKMSGSPHSKAQNQQT (SEQ ID NO: 3241).
   202. The AAV particle of any one of embodiments 130-201, wherein [N1]-[N2]-[N3] is present in loop IV of the AAV capsid variant.
   203. The AAV particle of any one of embodiments 160-164 or 196-202, wherein [N0] and [N4] are present in loop IV of the AAV capsid variant.
   204. The AAV particle of any one of embodiments 160-164 or 196-203, wherein [N0] is present immediately subsequent to position 448, relative to a reference sequence numbered according to the amino acid sequence of SEQ ID NO: 138, 981, or 982.
   205. The AAV particle of any one of embodiments 160-164 or 196-204, wherein [N0] replaces positions 449-452 (e.g., K449, T450, I451, and N452), relative to a reference sequence numbered according to SEQ ID NO: 138, 981, or 982.
   206. The AAV particle of any one of embodiments 160-164 or 196-205, wherein [N0] is present immediately subsequent to position 448 and wherein [N0] replaces positions 449-452 (e.g., K449, T450, I451, and N452), relative to a reference sequence numbered according to SEQ ID NO: 138, 981, or 982.
   207. The AAV particle of any one of embodiments 160-164 or 196-206, wherein [N0] corresponds to positions 449-452 (e.g., K449, T450, I451, and N452) of SEQ ID NO: 981 or 982.
   208. The AAV particle of any one of embodiments 130-207, wherein [N1] is present immediately subsequent to position 452, relative to a reference sequence numbered according to the amino acid sequence of SEQ ID NO: 138, 981, or 982.
   209. The AAV particle of any one of embodiments 130-208, wherein [N1] replaces positions 453-455 (e.g., G453, S454, and G455), relative to a reference sequence numbered according to SEQ ID NO: 138, 981, or 982.
   210. The AAV particle of any one of embodiments 130-208, wherein [N1] replaces position 453 (e.g., G453), relative to a reference sequence numbered according to SEQ ID NO: 138, 981, or 982.
   211. The AAV particle of any one of embodiments 130-164 or 200-210, wherein:
[0171] (i) position X1 of [N1] replaces position 453 (e.g., G453);
[0172] (ii) position X2 of [N1] corresponds to position 454 (e.g., 5454); and
[0173] (iii) position X3 of [N1] corresponds to position 455 (e.g., G455), wherein (i), (ii), and (iii) are numbered according to SEQ ID NO: 138 or SEQ ID NO: 981.
   212. The AAV particle of any one of embodiments 130-164 or 200-210, wherein:
[0174] (i) position X1 of [N1] corresponds to position 453 (e.g., G453);
[0175] (ii) position X2 of [N1] corresponds to position 454 (e.g., S454); and
[0176] (iii) position X3 of [N1] corresponds to position 455 (e.g., G455), wherein (i), (ii), and (iii) are numbered according to SEQ ID NO: 138 or SEQ ID NO: 981.
   213. The AAV particle of any one of embodiments 165-210, wherein:
[0177] (i) position X1 of [N1] corresponds to position 453 (e.g., G453);
[0178] (ii) position X2 of [N1] replaces position 454 (e.g., S454); and
[0179] (iii) position X3 of [N1] replaces position 455 (e.g., G455), wherein (i), (ii), and (iii) are numbered according to SEQ ID NO: 138 or SEQ ID NO: 982.
   214. The AAV particle of any one of embodiments 165-210, wherein [N1] corresponds to positions 453-455 (e.g., G453, H454, D455) of SEQ ID NO 982.
   215. The AAV particle of any one of embodiments 165-210, wherein [N1] corresponds to positions 453-455 (e.g., G453, S454, G455) of SEQ ID NO: 138 or 981.
   216. The AAV particle of any one of embodiments 130-215, wherein [N2] is present immediately subsequent to position 455, relative to a reference sequence numbered according to the amino acid sequence of SEQ ID NO: 138, 981, or 982.
   217. The AAV particle of any one of embodiments 130-216, wherein [N2] corresponds to positions 456-458 (e.g., S456, P457, and H458) of SEQ ID NO: 981 or 982.
   218. The AAV particle of any one of embodiments 130-216, wherein [N2] corresponds to positions 456-458 (e.g., S456, P457, and H458) of any one of SEQ ID NOs: 36-59.
   219. The AAV particle of any one of embodiments 130-218, wherein [N2] is present immediately subsequent to [N1].
   220. The AAV particle of any one of embodiments 130-219, wherein [N3] corresponds to positions 459-460 (e.g., S459, K460, A461) of SEQ ID NO 981.
   221. The AAV particle of any one of embodiments 130-220, wherein [N3] corresponds to positions 459-460 (e.g., S459, K460, A461) of SEQ ID NO: 36, 38, 39, 40, 41, 42, 43, 44, 45, 46, 47, 48, 49, 50, 51, 52, 53, 54, 55, 57, or 59
   222. The AAV particle of any one of embodiments 130-220, wherein [N2]-[N3] is present immediately subsequent to position 455, relative to a reference sequence numbered according to the amino acid sequence of SEQ ID NO: 138, 981, or 982.
   223. The AAV particle of any one of embodiments 130-164 or 200-222, wherein [N2]-[N3] is present immediately subsequent to position 455, relative to a reference sequence numbered according to the amino acid sequence of SEQ ID NO: 981.
   224. The AAV particle of any one of embodiments 130-164 or 200-223, wherein [N2]-[N3] corresponds to positions 456-461 (e.g., S456, P457, H458, S459, K460, A461) of SEQ ID NO: 981.
   225. The AAV particle of any one of embodiments 130-164 or 200-223, wherein [N2]-[N3] corresponds to positions 456-461 (e.g., S456, P457, H458, S459, K460, A461) of any one of SEQ ID NOs: 36, 38, 39, 40, 41, 42, 43, 44, 45, 46, 47, 48, 49, 50, 51, 52, 53, 54, 55, 57, or 59.
   226. The AAV particle of any one of embodiments 165-222, wherein [N3] corresponds to positions 459-460 (e.g., K459, S460, G461) of SEQ ID NO: 982.
   227. The AAV particle of any one of embodiments 165-219 or 222-226, wherein [N3] corresponds to positions 459-460 (e.g., K459, S460, G461) of SEQ ID NO: 37.
   228. The AAV particle of any one of embodiments 165-222 or 226, wherein [N2]-[N3] is present immediately subsequent to position 455, relative to a reference sequence numbered according to the amino acid sequence of SEQ ID NO: 982.
   229. The AAV particle of any one of embodiments 165-228, wherein [N3] replaces positions 454 and 455 (e.g., S454 and G455), numbered according to SEQ ID NO: 138.
   230. The AAV particle of any one of embodiments 165-229, wherein [N3] is present immediately subsequent to [N2] and replaces positions 454 and 455 (e.g., S454 and G455), numbered according to SEQ ID NO: 138.
   231. The AAV particle of any one of embodiments 165-230, wherein [N3] is present immediately subsequent to [N1]-[N2] and replaces positions 454 and 455 (e.g., S454 and G455), numbered according to SEQ ID NO: 138.
   232. The AAV particle of any one of embodiments 165-222, 226, or 228, wherein [N2]-[N3] corresponds to positions 456-461 (e.g., S456, P457, H458, K459, S460, G461) of SEQ ID NO: 982.
   233. The AAV particle of any one of embodiments 165-222, 226, or 228, wherein [N2]-[N3] corresponds to positions 456-461 (e.g., S456, P457, H458, K459, S460, G461) of SEQ ID NO: 37.
   234. The AAV particle of any one of embodiments 153-164 or 190-233, wherein [N4] is present immediately subsequent to position 455, relative to a reference sequence numbered according to the amino acid sequence of SEQ ID NO: 138.
   235. The AAV particle of any one of embodiments 153-164 or 190-234, wherein [N4] replaces positions 456-460 (e.g., Q456, N457, Q458, Q459, and T460), relative to a reference sequence numbered according to the amino acid sequence of SEQ ID NO: 138.
   236. The AAV particle of any one of embodiments 153-164 or 190-235, wherein [N4] corresponds to positions 462-466 (e.g., Q462, N463, Q464, Q465, and T466) of SEQ ID NO: 981 or 982.
   237. The AAV particle of any one of embodiments 153-164 or 190-235, wherein [N4] corresponds to positions 462-466 of any one of SEQ ID NOs: 36-59.
   238. The AAV particle of any one of embodiments 153-164 or 190-235, wherein [N4] corresponds to positions 456-460 (e.g., Q456, N457, Q458, Q459, and T460) of SEQ ID NO: 138.
   239. The AAV particle of any one of embodiments 153-164 or 190-236, wherein [N2]-[N3]-[N4] replaces positions 456-460 (e.g., Q456, N457, Q458, Q459, and T460), relative to a reference sequence numbered according to the amino acid sequence of SEQ ID NO: 138.
   240. The AAV particle of any one of embodiments 153-164 or 190-239, wherein [N2]-[N3]-[N4] is present immediately subsequent to position 455, and wherein [N2]-[N3]-[N4] replaces positions 456-460 (e.g., Q456, N457, Q458, Q459, and T460), relative to a reference sequence numbered according to the amino acid sequence of SEQ ID NO: 138.
   241. The AAV particle of any one of embodiments 153-164 or 190-240, wherein [N1]-[N2]-[N3]-[N4] replaces positions 453-460 (e.g., G453, S454, G455, Q456, N457, Q458, Q459, and Q460), relative to a reference sequence numbered according to the amino acid sequence of SEQ ID NO: 138.
   242. The AAV particle of any one of embodiments 153-164 or 190-241, wherein [N1]-[N2]-[N3]-[N4] is present immediately subsequent to position 452, and wherein [N1]-[N2]-[N3]-[N4] replaces positions 453-460 (e.g., G453, S454, G455, Q456, N457, Q458, Q459, and Q460), relative to a reference sequence numbered according to the amino acid sequence of SEQ ID NO: 138.
   243. The AAV particle of any one of embodiments 153-164 or 190-242, wherein [N1]-[N2]-[N3]-[N4] corresponds to positions 453-466 (e.g., G453, S454, G455, 5456, P457, H458, S459, K460, A461, Q462, N463, Q464, Q465, Q466) of SEQ ID NO: 981.
   244. The AAV particle of any one of embodiments 153-164 or 190-243, wherein [N1]-[N2]-[N3] corresponds to positions 453-461 (e.g., G453, S454, G455, S456, P457, H458, S459, K460, A461) of SEQ ID NO: 981.
   245. The AAV particle of any one of embodiments 153-164 or 190-242, wherein [N1]-[N2]-[N3]-[N4] corresponds to positions 453-466 (e.g., G453, H454, D455, S456, P457, H458, K459, S460, G461, Q462. N463, Q464, Q465, Q466) of SEQ ID NO: 982.
   246. The AAV particle of any one of embodiments 153-164, 190-242, or 245, wherein [N1]-[N2]-[N3] corresponds to positions 453-461 (e.g., G453, H454, D455, S456, P457, H458, K459, S460, G461) of SEQ ID NO: 982.
   247. The AAV particle of any one of embodiments 153-164, 190-242, or 245, wherein [N1]-[N2]-[N3]-[N4] corresponds to positions 453-466 of any one of SEQ ID NOs: 36-59
   248. The AAV particle of any one of embodiments 160-164 or 190-245, wherein [N0]-[N1]-[N2]-[N3]-[N4] replaces positions 449-460 (e.g., K449, T450, I451, N452, G453, S454, G455, Q456, N457, Q458, Q459, T460), relative to a reference sequence numbered according to the amino acid sequence of SEQ ID NO: 138.
   249. The AAV particle of any one of embodiments 160-164 or 190-248, wherein [N0]-[N1]-[N2]-[N3]-[N4] is present immediately subsequent to position 448, and wherein [N0]-[N1]-[N2]-[N3]-[N4] replaces positions 449-460 (e.g., K449, T450, I451, N452, G453, S454, G455, Q456, N457, Q458, Q459, Q460), relative to a reference sequence numbered according to the amino acid sequence of SEQ ID NO: 138.
   250. The AAV particle of any one of embodiments 160-164 or 202-249, wherein [N0]-[N1]-[N2]-[N3]-[N4] corresponds to positions 449-466 (e.g., K449, T450, I451, N452, G453, S454, G455, S456, P457, H458, S459, K460, A461, Q462, N463, Q464. Q465, T466) of SEQ ID NO: 981.
   251. The AAV particle of any one of embodiments 202-249, wherein [N0]-[N1]-[N2]-[N3]-[N4] corresponds to positions 449-466 (e.g., K449, T450, I451, N452, G453, H454, D455, S456, P457, H458, K459, S460, G461, Q462, N463, Q464, Q465. T466) of SEQ ID NO: 982.
   252. The AAV particle of any one of embodiments 202-249, wherein [N0]-[N1]-[N2]-[N3]-[N4] corresponds to positions 449-466 of any one of SEQ ID NOs: 36-59.
   253. The AAV particle of any one of embodiments 153-164 or 190-251, wherein [N4] is present immediately subsequent to position 461, relative to a reference sequence numbered according to the amino acid sequence of SEQ ID NO: 981 or 982.
   254. The AAV particle of any one of embodiments 153-164 or 190-253, wherein [N4] replaces positions 462-466 (e.g., Q462, N463, Q464, Q465, and T466), relative to a reference sequence numbered according to the amino acid sequence of SEQ ID NO: 981 or 982.
   255. The AAV particle of any one of embodiments 153-164 or 190-154, wherein [N2]-[N3]-[N4] replaces positions 462-466 (e.g., Q462, N463, Q464, Q465, and T466), relative to a reference sequence numbered according to the amino acid sequence of SEQ ID NO: 981 or 982.
   256. The AAV particle of any one of embodiments 153-164 or 190-255, wherein [N2]-[N3]-[N4] is present immediately subsequent to position 455, and wherein [N2]-[N3]-[N4] replaces positions 462-466 (e.g., Q462, N463, Q464, Q465, and T466), relative to a reference sequence numbered according to the amino acid sequence of SEQ ID NO: 981 or 982.
   257. The AAV particle of any one of embodiments 130-256, wherein the AAV capsid variant comprises from N-terminus to C-terminus, [N2]-[N3].
   258. The AAV particle of any one of embodiments 130-257, wherein the AAV capsid variant comprises from N-terminus to C-terminus, [N1]-[N2]-[N3].
   259. The AAV particle of any one of embodiments 130-258, wherein the AAV capsid variant comprises from N-terminus to C-terminus, [N0]-[N1]-[N2]-[N3].
   260. The AAV particle of any one of embodiments 130-259, wherein the AAV capsid variant comprises from N-terminus to C-terminus, [N1]-[N2]-[N3]-[N4].
   261. The AAV particle of any one of embodiments 130-260, wherein the AAV capsid variant comprises from N-terminus to C-terminus, [N0]-[N1]-[N2]-[N3]-[N4]. 262. An AAV particle comprising an AAV capsid variant and a nucleic acid comprising a transgene encoding an antibody molecule which binds to HER2/neu (e.g., human HER2/neu), wherein the AAV capsid variant:
[0180] (i) is enriched, e.g., at least about 10, 15, 20, 25, 30, 35, 40, 45, 50, 55, 60, 65, 70, 75, 80, 85, 90, 95, 100, 105, 115, 120, 125, 130, 135, 140, 145, 150, 155, 160, 165, 170, 175, 180, 190, 200, 205, or 210-fold, in the brain of at least two to three species, e.g., a non-human primate and rodent (e.g., mouse), e.g., as compared to a reference sequence of SEQ ID NO: 138, optionally wherein the at least two to three species are Macaca fascicularis, Chlorocebus sabaeus, Callithrix jacchus, and/or mouse (e.g., BALB/c mice, C57Bl/6 mice, and/or CD-1 outbred mice); and/or
[0181] (ii) is capable of transducing neuronal and non-neuronal cells, e.g., glial cells, oligodendrocytes (e.g., Olig2 positive oligodendrocytes), and/or astrocytes (e.g., Olig2 positive astrocytes).
   263. An AAV particle comprising an AAV capsid variant and a nucleic acid comprising a transgene encoding an antibody molecule which binds to HER2/neu (e.g., human HER2/neu), wherein the AAV capsid variant comprises:
[0182] (a) the amino acid sequence of any of the sequences provided in Tables 1A, 2A, 2B, 9-11, 15, or 16;
[0183] (b) an amino acid sequence comprising at least 3, 4, 5, 6, 7, 8, 9, 10, 11, 12, 13, 14, 15, 16, or 17 consecutive amino acids from any one of the sequences provided in Tables 1A, 2A, 2B, 9-11, 15, or 16; or
[0184] (c) an amino acid sequence comprising at least one, two, or three but no more than four different amino acids, relative to any one of the sequences provided in Tables 1A, 2A, 2B, 9-11, 15, or 16; or
[0185] (d) an amino acid sequence comprising at least one, two, or three but no more than four modifications, e.g., substitutions (e.g., conservative substitutions), relative to the amino acid sequence of any one of the sequences provided in Tables 1A, 2A, 2B, 9-11, 15, or 16.
   264. An AAV particle comprising an AAV capsid variant and a nucleic acid comprising a transgene encoding an antibody molecule which binds to HER2/neu (e.g., human HER2/neu), wherein the AAV capsid variant comprises:
[0186] (a) the amino acid sequence of any of SEQ ID NOs: 945-980 or 985-986;
[0187] (b) an amino acid sequence comprising at least 3, 4, or 5 consecutive amino acids from any one of SEQ ID NOs: 945-980 or 985-986; or
[0188] (c) an amino acid sequence comprising at least one, two, or three but no more than four different amino acids, relative to the amino acid sequence of any one of SEQ ID NOs: 945-980 or 985-986;
[0189] (d) an amino sequence comprising at least one, two, or three but no more than four modifications, e.g., substitutions (e.g., conservative substitutions), relative to the amino acid sequence of any one of SEQ ID NOs: 945-980 or 985-986.
   265. An AAV particle comprising an AAV capsid variant and a nucleic acid comprising a transgene encoding an antibody molecule which binds to HER2/neu (e.g., human HER2/neu), wherein the AAV capsid variant comprises:
[0190] (a) the amino acid sequence of any of SEQ ID NOs: 2, 200, 201, 941, 943, 204, 208, 404, or 903-909;
[0191] (b) an amino acid sequence comprising at least 3, 4, 5, 6, 7, 8, 9, 10, 11, 12, or 13 consecutive amino acids from any one of SEQ ID NOs: 2, 200, 201, 941, 943, 204, 208, 404, or 903-909;
[0192] (c) an amino acid sequence comprising at least one, two, or three but no more than four different amino acids, relative to the amino acid sequence of any one of SEQ ID NOs: 2, 200, 201, 941, 943, 204, 208, 404, or 903-909; or
[0193] (d) an amino acid sequence comprising at least one, two, or three but no more than four modifications, e.g., substitutions (e.g., conservative substitutions), relative to the amino acid sequence of any one of SEQ ID NOs: 2, 200, 201, 941, 943, 204, 208, 404, or 903-909.
   266. The AAV particle of any one of embodiments 262, 263 or 265, wherein the AAV capsid variant comprises an amino acid sequence comprising at least 4, 5, 6, 7, 8, 9, 10, 11, 12, or 13 consecutive amino acids from any one of SEQ ID NOs: 2, 200, 201, 941, 943, 204, 208, 404, or 903-909.
   267. The AAV particle of any one of embodiments 262-266, wherein the 3 consecutive amino acids comprise SPH.
   268. The AAV particle of any one of embodiments 262-267, wherein the 4 consecutive amino acids comprise SPHS (SEQ ID NO: 6616).
   269. The AAV particle of any one of embodiments 262-268, wherein the 5 consecutive amino acids comprise SPHSK (SEQ ID NO: 6617).
   270. The AAV particle of any one of embodiments 262-269, wherein the 6 consecutive amino acids comprise SPHSKA (SEQ ID NO: 941).
   271. The AAV particle of embodiment 262-266, wherein the 3 consecutive amino acids comprise HDS.
   272. The AAV particle of any one of embodiments 262-266 or 271, wherein the 4 consecutive amino acids comprise HDSP (SEQ ID NO: 6618).
   273. The AAV particle of any one of embodiments 262-266, 271, or 272, wherein the 5 consecutive amino acids comprise HDSPH (SEQ ID NO: 6619).
   274. The AAV particle of any one of embodiments 262-266 or 271-273, wherein the 6 consecutive amino acids comprise HDSPHK (SEQ ID NO: 2).
   275. The AAV particle of any one of embodiments 262-267, wherein:
[0194] (i) the 3 consecutive amino acids comprise SPH;
[0195] (ii) the 4 consecutive amino acids comprise SPHK (SEQ ID NO: 7580);
[0196] (iii) the 5 consecutive amino acids comprise SPHKY (SEQ ID NO: 6631); and/or (iv) the 6 consecutive amino acids comprise SPHKYG (SEQ ID NO: 966).
   276. The AAV particle of embodiment 262, 263, 265, or 266, wherein the AAV capsid variant comprises an amino acid sequence comprising at least one, two, or three but no more than four modifications, e.g., substitutions (e.g., conservative substitutions), relative to the amino acid sequence of any one of SEQ ID NOs: 2, 200, 201, 941, 943, 204, 208, 404, or 903-909.
   277. The AAV particle of any one of embodiments 262-270 or 276, wherein the AAV capsid variant comprises an amino acid sequence comprising at least one, two, or three but no more than four modifications, e.g., substitutions (e.g., conservative substitutions), relative to the amino acid sequence of SPHSKA (SEQ ID NO: 941).
   278. The AAV particle of any one of embodiments 262-266, 271-274, or 276, wherein the AAV capsid variant comprises an amino acid sequence comprising at least one, two, or three but no more than four modifications, e.g., substitutions (e.g., conservative substitutions), relative to the amino acid sequence of

(SEQ ID NO: 2)
HDSPHK.

279. The AAV particle of any one of embodiments 262-267, 275, or 276, wherein the AAV capsid variant comprises an amino acid sequence comprising at least one, two, or three but no more than four modifications, e.g., substitutions (e.g., conservative substitutions), relative to the amino acid sequence of

(SEQ ID NO: 966)
SPHKYG.

280. The AAV particle of embodiment 262 or 263, wherein the AAV capsid variant comprises:
[0197] (i) an amino acid sequence comprising at least one, two, or three but no more than four modifications, e.g., substitutions (e.g., conservative substitutions), relative to the amino acid sequence of

(SEQ ID NO: 3589)
KTERVSGSPHSKAQNQQT;

[0198] (ii) an amino acid sequence comprising at least one, two, or three but no more than four modifications, e.g., substitutions (e.g., conservative substitutions), relative to the amino acid sequence of

(SEQ ID NO: 1754)
KAEIGHDSPHKSGQNQQT;

[0199] (iii) an amino acid sequence comprising at least one, two, or three but no more than four modifications, e.g., substitutions (e.g., conservative substitutions), relative to the amino acid sequence of KTEKMSGSPHSKAQNQQT (SEQ ID NO: 3241);

(SEQ ID NO: 3241)
KTEKMSGSPHSKAQNQQT;

[0200] (iv) an amino acid sequence comprising at least one, two, or three but no more than four modifications, e.g., substitutions (e.g., conservative substitutions), relative to the amino acid sequence of KTINGHDSPHSKAQNLQT (SEQ ID NO: 4100); or

(SEQ ID NO: 4100)
KTINGHDSPHSKAQNLQT;

[0201] (v) an amino acid sequence comprising at least one, two, or three but no more than four modifications, e.g., substitutions (e.g., conservative substitutions), relative to the amino acid sequence of

(SEQ ID NO: 4062)
KTVNGHDSPHSKAQNQQT.

[0202] 281. The AAV particle of any one of embodiments 262, 263, 265, 266, or 276, wherein the AAV capsid variant comprises an amino acid sequence comprising at least one, two, or three but no more than four different amino acids relative to the amino acid sequence of any one of SEQ ID NOs: 200, 201, 941, 943, 204, 208, 404, or 903-909.

282. The AAV particle of any one of embodiments 262-270, 276, 277, or 281, wherein the AAV capsid variant comprises an amino acid sequence comprising at least one, two, or three but no more than four different amino acids relative to the amino acid sequence of SPHSKA (SEQ ID NO: 941).
283. The AAV particle of any one of embodiments 262-266, 271-274, 276, 278, or 281, wherein the AAV capsid variant comprises an amino acid sequence comprising at least one, two, or three but no more than four different amino acids relative to the amino acid sequence of HDSPHK (SEQ ID NO: 2).
284. The AAV particle of any one of embodiments 262-267, 275, 276, or 281, wherein the AAV capsid variant comprises an amino acid sequence comprising at least one, two, or three but no more than four different amino acids relative to the amino acid sequence of SPHKYG (SEQ ID NO: 966).
285. The AAV particle of any one of embodiments 262, 263 or 280, wherein the AAV capsid variant comprises:
[0203] (i) an amino acid sequence comprising at least one, two, or three but no more than four different amino acids relative to the amino acid sequence of KTERVSGSPHSKAQNQQT (SEQ ID NO: 3589);
[0204] (ii) an amino acid sequence comprising at least one, two, or three but no more than four different amino acids relative to the amino acid sequence of KAEIGHDSPHKSGQNQQT (SEQ ID NO: 1754);
[0205] (iii) an amino acid sequence comprising at least one, two, or three but no more than four different amino acids relative to the amino acid sequence of KTEKMSGSPHSKAQNQQT (SEQ ID NO: 3241);
[0206] (iv) an amino acid sequence comprising at least one, two, or three but no more than four different amino acids relative to the amino acid sequence of KTINGHDSPHSKAQNLQT (SEQ ID NO: 4100);
[0207] (v) an amino acid sequence comprising at least one, two, or three but no more than four different amino acids relative to the amino acid sequence of KTVNGHDSPHSKAQNQQT (SEQ ID NO: 4062); or (vi) an amino acid sequence comprising at least one, two, or three but no more than four different amino acids relative to the amino acid sequence of KTENVSGSPHSKAQNQQT (SEQ ID NO: 3272).
   286. The AAV particle of any one of embodiments 1-129, 262, 263, 265-279, or 281-284, wherein the AAV capsid variant comprises the amino acid sequence of any of SEQ ID NOs: 200, 201, 941, 943, 204, 208, 404, or 903-909.
   287. The AAV particle of any one of embodiments 262, 263, 267-270, 276, 277, 280-282, 285, or 286, wherein the AAV capsid variant comprises the amino acid sequence of ERVSGSPHSKA (SEQ ID NO: 7581), optionally wherein the amino acid sequence is present immediately subsequent to position 450 and replaces positions 451-455, numbered according to SEQ ID NO: 138.
   288. The AAV particle of any one of embodiments 262, 263, 267-270, 276, 277, 280-282, or 285-287, wherein the AAV capsid variant comprises the amino acid sequence of KTERVSGSPHSKAQNQQT (SEQ ID NO: 3589), optionally wherein the amino acid sequence is present immediately subsequent to position 448 and replaces positions 449-460, numbered according to SEQ ID NO: 138.
   289. The AAV particle of any one of embodiments 262, 263, 271-274, 276, 278, 280, 281, 283, 285, or 286, wherein the AAV capsid variant comprises the amino acid sequence of AEIGHDSPHKSG (SEQ ID NO: 7582), optionally wherein the amino acid sequence is present immediately subsequent to position 449 and replaces positions 450-455, numbered according to SEQ ID NO: 138.
   290. The AAV particle of any one of embodiments 262, 263, 271-274, 276, 278, 280, 281, 283, 285, 286, or 289, wherein the AAV capsid variant comprises the amino acid sequence of KAEIGHDSPHKSGQNQQT (SEQ ID NO: 1754), optionally wherein the amino acid sequence is present immediately subsequent to position 448 and replaces positions 449-460, (e.g., K449, T450, I451, N452, G453, S454, G455, Q456, N457, Q458, Q459. T460), numbered according to SEQ ID NO: 138.
   291. The AAV particle of any one of embodiments 262, 263, 271-274, 276, 278, 280, 281, 283, 285, or 286, which comprises the amino acid sequence of EKMSGSPHSKA (SEQ ID NO: 6401), optionally wherein the amino acid sequence is present immediately subsequent to position 450 and replaces positions 451-455 (e.g., I451, N452, G453, S454, G455), numbered according to SEQ ID NO: 138.
   292. The AAV particle of any one of embodiments 262, 263, 271-274, 276, 278, 280, 281, 283, 285, 286, or 291, wherein the AAV capsid variant comprises the amino acid sequence of KTEKMSGSPHSKAQNQQT (SEQ ID NO: 3241), optionally wherein the amino acid sequence is present immediately subsequent to position 448 and replaces positions 449-460 (e.g., K449, T450, I451, N452, G453, S454, G455, Q456, N457, Q458. Q459, T460), numbered according to SEQ ID NO: 138.
   293. The AAV particle of any one of embodiments 262, 263, 271-274, 276, 278, 280, 281, 283, 285, or 286, wherein the AAV capsid variant comprises the amino acid sequence of HDSPHSKAQNL (SEQ ID NO: 6402), optionally wherein the amino acid sequence is present immediately subsequent to position 453 and replaces positions 456-458 (e.g., Q456, N457, Q458), numbered according to SEQ ID NO: 138.
   294. The AAV particle of any one of embodiments 262, 263, 271-274, 276, 278, 280, 281, 283, 285, 286, or 293, wherein the AAV capsid variant comprises the amino acid sequence of KTINGHDSPHSKAQNLQT (SEQ ID NO: 4100), optionally wherein the amino acid sequence is present immediately subsequent to position 448 and replaces positions 449-460 (e.g., K449, T450, I451, N452, G453, S454, G455, Q456, N457, Q458, Q459. T460), numbered according to SEQ ID NO: 138.
   295. The AAV particle of any one of embodiments 262, 263, 271-274, 276, 278, 280, 281, 283, 285, or 286, wherein the AAV capsid variant comprises the amino acid sequence of VNGHDSPHSKA (SEQ ID NO: 6403), optionally wherein the amino acid sequence is present immediately subsequent to position 450 and replaces positions 451-455 (e.g., I451, N452, G453, S454, G455), numbered according to SEQ ID NO: 138.
   296. The AAV particle of any one of embodiments 262, 263, 271-274, 276, 278, 280, 281, 283, 285, 286, or 295, which comprises the amino acid sequence of KTVNGHDSPHSKAQNQQT (SEQ ID NO: 4062), optionally wherein the amino acid sequence is present immediately subsequent to position 448 and replaces positions 449-460 (e.g., K449, T450, I451, N452, G453, S454, G455, Q456, N457, Q458, Q459, T460), numbered according to SEQ ID NO: 138.
   297. The AAV particle of any one of embodiments 262, 263, 271-274, 276, 278, 280, 281, 283, 285, or 286, wherein the AAV capsid variant comprises the amino acid sequence of ENVSGSPHSKA, optionally wherein the amino acid sequence is present immediately subsequent to position 450 and replaces positions 451-455 (e.g., I451, N452, G453, S454, G455), numbered according to SEQ ID NO: 138; or is present at positions 451 to 461 numbered according to SEQ ID NO: 981.
   298. The AAV particle of any one of embodiments 262, 263, 271-274, 276, 278, 280, 281, 283, 285, 286, or 293, wherein the AAV capsid variant comprises the amino acid sequence of KTENVSGSPHSKAQNQQT (SEQ ID NO: 3272), optionally wherein the amino acid sequence is present immediately subsequent to position 448 and replaces positions 449-460 (e.g., K449, T450, I451, N452, G453, S454, G455, Q456, N457, Q458, Q459. T460), numbered according to SEQ ID NO: 138; or is present at positions 449 to 466 numbered according to SEQ ID NO: 981.
   299. The AAV particle of any one of embodiments 1-23, 26-29, 32, 35-43, 46-51, 54-71, 79-89, 94-99, 102-104, 100-112, 115-164, 203-209, 212, 216-224, 234-243, 248-250, 253-270, 276, 277, 281, 282, or 286-288, wherein the AAV capsid variant comprises an amino acid sequence encoded by: the nucleotide sequence of SEQ ID NO: 942; a nucleotide sequence comprising at least one, two, three, four, five, six, or seven modifications, e.g., substitutions (e.g., conservative substitutions), but no more than ten modifications, e.g., substitutions (e.g., conservative substitutions), relative to the nucleotide sequence of SEQ ID NO: 942; or a nucleotide sequence comprising at least one, two, three, four, five, six, or seven, but no more than ten different nucleotides relative to the nucleotide sequence of SEQ ID NO: 942.
   300. The AAV particle of any one of embodiments 1-9, 11, 12-22, 24, 26, 28, 30, 33, 35-42, 44, 46-50, 52, 54-78, 83-88, 90-98, 100-103, 105-111, 113-129, 165-211, 213-222, 226-242, 245-249, 251-266, 271-274, 276, 278, 280, 281, 283, 285, 286, 289, or 290, wherein the AAV capsid variant comprises an amino acid sequence encoded by: the nucleotide sequence of SEQ ID NO: 3; a nucleotide sequence comprising at least one, two, three, four, five, six, or seven modifications, e.g., substitutions (e.g., conservative substitutions), but no more than ten modifications, e.g., substitutions (e.g., conservative substitutions), relative to the nucleotide sequence of SEQ ID NO: 3; or a nucleotide sequence comprising at least one, two, three, four, five, six, or seven, but no more than ten different nucleotides relative to the nucleotide sequence of SEQ ID NO: 3.
   301. The AAV particle of any one of embodiments 1-23, 26-29, 32, 35-43, 46-51, 54-71, 79-89, 94-99, 102-104, 100-112, 115-164, 203-209, 212, 216-224, 234-243, 248-250, 253-270, 276, 277, 281, 282, 286-288, or 299, wherein the nucleotide sequence encoding the AAV capsid variant comprises the nucleotide sequence of SEQ ID NO: 942; a nucleotide sequence comprising at least one, two, three, four, five, six, or seven modifications, e.g., substitutions (e.g., conservative substitutions), but no more than ten modifications, e.g., substitutions (e.g., conservative substitutions), relative to the nucleotide sequence of SEQ ID NO: 942; or a nucleotide sequence comprising at least one, two, three, four, five, six, or seven, but no more than ten different nucleotides relative to the nucleotide sequence of SEQ ID NO: 942.
   302. The AAV particle of any one of embodiments 1-9, 11, 12-22, 24, 26, 28, 30, 33, 35-42, 44, 46-50, 52, 54-78, 83-88, 90-98, 100-103, 105-111, 113-129, 165-211, 213-222, 226-242, 245-249, 251-266, 271-274, 276, 278, 280, 281, 283, 285, 286, 289, 290, or 300, wherein the nucleotide sequence encoding the AAV capsid variant comprises the nucleotide sequence of SEQ ID NO: 3; a nucleotide sequence comprising at least one, two, three, four, five, six, or seven modifications, e.g., substitutions (e.g., conservative substitutions), but no more than ten modifications, e.g., substitutions (e.g., conservative substitutions), relative to the nucleotide sequence of SEQ ID NO: 3; or a nucleotide sequence comprising at least one, two, three, four, five, six, or seven, but no more than ten different nucleotides relative to the nucleotide sequence of SEQ ID NO: 3.
   303. The AAV particle of any one of embodiments 262-302, wherein the amino acid sequence is present in loop IV of the AAV capsid variant.
   304. The AAV particle of any one of embodiments 262-303, wherein the amino acid sequence is present immediately subsequent to position 448, 449, 450, 451, 452, 453, 454, or 455, relative to a reference sequence numbered according to the amino acid sequence of SEQ ID NO: 138.
   305. The AAV particle of any one of embodiments 262-304, wherein the amino acid sequence replaces amino acids 449, 450, 451, 452, 453, 454, 455, 456, 457, 458, 459, and/or 460 (e.g., K449, T450, I451, N452, G453, S454, G455, Q456, N457, Q458, Q459, and/or T460), relative to a reference sequence numbered according to the amino acid sequence of SEQ ID NO: 138.
   306. The AAV particle of any one of embodiments 262-305, wherein the amino acid sequence is present immediately subsequent to position 455, relative to a reference sequence numbered according to the amino acid sequence of SEQ ID NO: 138.
   307. The AAV particle of any one of embodiments 262-306, wherein the amino acid sequence is present immediately subsequent to position 453, relative to a reference sequence numbered according to the amino acid sequence of SEQ ID NO: 138.
   308. The AAV particle of any one of embodiments 1-23, 26-29, 32, 35-43, 46-51, 54-71, 79-89, 94-99, 102-104, 100-112, 115-164, 203-209, 212, 216-224, 234-243, 248-250, 253-270, 276, 277, 281, 282, 286-288, 299, 301, or 303-307, wherein the AAV capsid variant comprises the amino acid sequence of SPHSKA (SEQ ID NO: 941), wherein the amino acid sequence is present immediately subsequent to position 455, relative to a reference sequence numbered according to the amino acid sequence of SEQ ID NO: 138.
   309. The AAV particle of any one of embodiments 1-23, 26-29, 32, 35-43, 46-51, 54-71, 79-89, 94-99, 102-104, 100-112, 115-164, 203-209, 212, 216-224, 234-243, 248-250, 253-270, 276, 277, 281, 282, 286-288, 299, 301, or 303-308, wherein the AAV capsid variant comprises the amino acid sequence of SPHSKA (SEQ ID NO: 941), wherein the amino acid sequence is present immediately subsequent to position 455, relative to a reference sequence numbered according to the amino acid sequence of SEQ ID NO: 981.
   310. The AAV particle of embodiment 308 or 309, wherein the AAV capsid variant further comprises an amino acid other than I at position 451, an amino acid other than N at position 452, and an amino acid other than G at position 453, numbered according to any one of SEQ ID NOs: 36, 138, or 981.
   311. The AAV particle of any one of embodiments 308-310, wherein the AAV capsid variant further comprises E at position 451, R at position 452, and V at position 453, numbered according to any one of SEQ ID NOs: 36, 138, or 981.
   312. The AAV particle of any one of embodiments 308-311, wherein the AAV capsid variant further comprises the substitutions I451E, N452R, and G453V, numbered according to any one of SEQ ID NOs: 36, 138, or 981.
   313. The AAV particle of any one of embodiments 308-312, wherein the AAV capsid variant comprises:
[0208] (i) E at position 451, R at position 452, and V at position 453, numbered according to any one of SEQ ID NOs: 36, 138, or 981; and
[0209] (ii) the amino acid sequence of SPHSKA (SEQ ID NO: 941), wherein the amino acid sequence is present immediately subsequent to position 455, numbered according to any one of SEQ ID NOs: 36, 138, or 981.
   314. The AAV particle of embodiment 308 or 309, which further comprises an amino acid other than I at position 451, an amino acid other than N at position 452, and/or G at position 453, numbered according to SEQ ID NO: 39 or 138.
   315. The AAV particle of any one of embodiments 308, 309, or 314, which further comprises E at position 451, K at position 452, and/or M at position 453, numbered according to SEQ ID NO: 138 or 39.
   316. The AAV particle of any one of embodiments 308, 309, 314, or 315, which further comprises the substitutions I451E, N452K, and G453M, numbered according to SEQ ID NO: 39 or 138.
   317. The AAV particle of any one of embodiments 308, 309, or 314-316, which comprises:
[0210] (i) E at position 451, K at position 452, and M at position 453, numbered according to SEQ ID NO: 39 or 138; and
[0211] (ii) the amino acid sequence of SPHSKA (SEQ ID NO: 941), wherein the amino acid sequence is present immediately subsequent to position 455, numbered according to SEQ ID NO: 39 or 138.
   318. The AAV particle of embodiment 308 or 309, which further comprises an amino acid other than S at position 454, an amino acid other than G at position 455, and/or Q at position 458, numbered according to SEQ ID NO: 138.
   319. The AAV particle of any one of embodiments 308, 309, or 318, which further comprises H at position 454, D at position 455, and/or L at position 458, numbered according to SEQ ID NO: 138.
   320. The AAV particle of any one of embodiments 308, 309, 318, or 319, which further comprises the substitutions S454H, G455D, and Q458L, numbered according to SEQ ID NO: 138.
   321. The AAV particle of any one of embodiments 308, 309, or 318-320, which comprises:
[0212] (i) H at position 454, D at position 455, and/or L at position 458, numbered according to SEQ ID NO: 138; and
[0213] (ii) the amino acid sequence of SPHSKA (SEQ ID NO: 941), wherein the amino acid sequence is present immediately subsequent to position 455, numbered according to SEQ ID NO: 138.
   322. The AAV particle of embodiment 308 or 309, which further comprises an amino acid other than I at position 451, an amino acid other than S at position 454, and/or an amino acid other than G at position 455, numbered according to SEQ ID NO: 52 or 138.
   323. The AAV particle of any one of embodiments 308, 309, or 322, which further comprises V at position 451, H at position 454, and/or D at position 455, numbered according to SEQ ID NO: 52 or 138.
   324. The AAV particle of any one of embodiments 308, 309, 322, or 323, wherein the AAV capsid variant further comprises the substitutions I451V, S454H, and/or G455D, numbered according to SEQ ID NO: 52 or 138.
   325. The AAV particle of any one of embodiments 308, 309, or 322-324, wherein the AAV capsid variant comprises:
[0214] (i) V at position 451, H at position 454, and/or D at position 455, numbered according to SEQ ID NO: 52 or 138; and
[0215] (ii) the amino acid sequence of SPHSKA (SEQ ID NO: 941), wherein the amino acid sequence is present immediately subsequent to position 455, numbered according to SEQ ID NO: 52 or 138.
   326. The AAV particle of embodiment 308 or 309, wherein the AAV capsid variant comprises an amino acid other than I at position 451 and/or G at position 453, numbered according to SEQ ID NO: 138.
   327. The AAV particle of any one of embodiments 308, 309, or 326, wherein the AAV capsid variant comprises E at position 451 and/or V at position 453, numbered according to SEQ ID NO: 138 or 1A.
   328. The AAV particle of any one of embodiments 308, 309, 326, or 327, wherein the AAV capsid variant comprises:
[0216] (i) E at position 451 and V at position 453, numbered according to SEQ ID NO: 981 or 138; and
[0217] (ii) the amino acid sequence of SPHSKA (SEQ ID NO: 941), wherein the amino acid sequence is present immediately subsequent to position 455, at positions 456-461, numbered according to SEQ ID NO: 981 or 138.
   329. The AAV particle of any one of embodiments 1-9, 11, 12-22, 24, 26, 28, 30, 33, 35-42, 44, 46-50, 52, 54-78, 83-88, 90-98, 100-103, 105-111, 113-129, 165-211, 213-222, 226-242, 245-249, 251-266, 271-274, 276, 278, 280, 281, 283, 285, 286, 289, 290, 300, 302-307, wherein the AAV capsid variant comprises the amino acid sequence of HDSPHK (SEQ ID NO: 2), wherein the amino acid sequence is present immediately subsequent to position 453, numbered relative to a reference sequence numbered according to the amino acid sequence of SEQ ID NO: 138.
   330. The AAV particle of any one of embodiments 1-9, 11, 12-22, 24, 26, 28, 30, 33, 35-42, 44, 46-50, 52, 54-78, 83-88, 90-98, 100-103, 105-111, 113-129, 165-211, 213-222, 226-242, 245-249, 251-266, 271-274, 276, 278, 280, 281, 283, 285, 286, 289, 290, 300, 302-307, or 329, wherein the AAV capsid variant comprises the amino acid sequence of HDSPHK (SEQ ID NO: 2), wherein the amino acid sequence is present immediately subsequent to position 453, numbered relative to a reference sequence numbered according to the amino acid sequence of SEQ ID NO: 982.
   331. The AAV particle of any one of embodiments 1-9, 11, 12-22, 24, 26, 28, 30, 33, 35-42, 44, 46-50, 52, 54-78, 83-88, 90-98, 100-103, 105-111, 113-129, 165-211, 213-222, 226-242, 245-249, 251-266, 271-274, 276, 278, 280, 281, 283, 285, 286, 289, 290, 300, 302-307, 329, or 330, wherein the AAV capsid variant comprises the amino acid sequence of SPHKSG (SEQ ID NO: 946), wherein the amino acid sequence is present immediately subsequent to position 455, numbered relative to a reference sequence numbered according to the amino acid sequence of SEQ ID NO: 982.
   332. The AAV particle of any one of embodiments 1-9, 11, 12-22, 24, 26, 28, 30, 33, 35-42, 44, 46-50, 52, 54-78, 83-88, 90-98, 100-103, 105-111, 113-129, 165-211, 213-222, 226-242, 245-249, 251-266, 271-274, 276, 278, 280, 281, 283, 285, 286, 289, 290, 300, 302-307, or 329-331, wherein the AAV capsid variant comprises:
[0218] (i) the amino acid sequence of HDSPHSKA (SEQ ID NO: 4486), which is present immediately subsequent to position 453; and
[0219] (ii) a deletion of amino acids SG at position 454 and 455;
[0220] wherein (i) and (ii) are numbered according to SEQ ID NO: 138.
   333. The AAV particle of any one of embodiments 1-9, 11, 12-22, 24, 26, 28, 30, 33, 35-42, 44, 46-50, 52, 54-78, 83-88, 90-98, 100-103, 105-111, 113-129, 165-211, 213-222, 226-242, 245-249, 251-266, 271-274, 276, 278, 280, 281, 283, 285, 286, 289, 290, 300, 302-307, or 329-332, wherein the AAV capsid variant comprises the amino acids HD at position 454 and 455, and further comprises the amino acid sequence of SPHSKA (SEQ ID NO: 941), which is present immediately subsequent to position 455, numbered relative to SEQ ID NO: 138.
   334. The AAV particle of any one of embodiments 329-333, wherein the AAV capsid variant further comprises an amino acid other than T at position 450, an amino acid other than I at position 451, and an amino acid other than N at position 452, numbered according to SEQ ID NO: 138 or 982.
   335. The AAV particle of any one of embodiments 329-334, wherein the AAV capsid variant further comprises A at position 450, E at position 451, and I at position 452, numbered according to SEQ ID NO: 138 or 982.
   336. The AAV particle of any one of embodiments 329-335, wherein the AAV capsid variant further comprises the substitutions T450A, I451E, and N452I, numbered according to SEQ ID NO: 138 or 982.
   337. The AAV particle of any one of embodiments 329-336, wherein the AAV capsid variant comprises:
[0221] (i) A at position 450, E at position 451, and I at position 452, numbered according to SEQ ID NO: 138 or 982; and
[0222] (ii) the amino acid sequence of HDSPHK (SEQ ID NO: 2), which is present immediately subsequent to positions 453, numbered according to SEQ ID NO: 138 or 982.
   338. The AAV particle of any one of embodiments 1-22, 25-27, 31, 34-42, 45-50, 53-63, 69, 79, 83-86, 94-98, 102, 103, 110, 111, 118-129, 262-267, 275, 276, 281, 284, 286, or 303-307, wherein the AAV capsid variant comprises the amino acid sequence of SPHKYG (SEQ ID NO: 966), wherein the amino acid sequence is present immediately subsequent to position 455, relative to a reference sequence numbered according to the amino acid sequence of SEQ ID NO: 138.
   339. An AAV particle comprising an AAV capsid variant and a nucleic acid comprising a transgene encoding an antibody molecule which binds to HER2/neu (e.g., human HER2/neu), wherein the AAV capsid variant comprises the amino acid sequence of HDSPHK (SEQ ID NO: 2), wherein the amino acid sequence is present immediately subsequent to position 453, numbered according to the amino acid sequence of SEQ ID NO: 982.
   340. An AAV particle comprising an AAV capsid variant and a nucleic acid comprising a transgene encoding an antibody molecule which binds to HER2/neu (e.g., human HER2/neu), wherein the AAV capsid variant comprises the amino acid sequence of SPHSKA (SEQ ID NO: 941), wherein the amino acid sequence is present immediately subsequent to position 455, numbered according to the amino acid sequence of SEQ ID NO: 981.
   341. An AAV particle comprising an AAV capsid variant and a nucleic acid comprising a transgene encoding an antibody molecule which binds to HER2/neu (e.g., human HER2/neu), wherein the AAV capsid variant comprises the amino acid sequence of HDSPHK (SEQ ID NO: 2), wherein the amino acid sequence is present immediately subsequent to position 453, numbered according to the amino acid sequence of SEQ ID NO: 37, and optionally further comprising:
[0223] (i) one, two, or all of an amino acid other than T at position 450, an amino acid other than I at position 541, and/or an amino acid other than N at position 452, numbered according to SEQ ID NO: 138 or 37;
[0224] (ii) one, two, or all of A at position 450, E at position 451, and/or I at position 452, numbered according to SEQ ID NO: 138 or 37.
   342. An AAV particle comprising an AAV capsid variant and a nucleic acid comprising a transgene encoding an antibody molecule which binds to HER2/neu (e.g., human HER2/neu), wherein the AAV capsid variant comprises the amino acid sequence of SPHSKA (SEQ ID NO: 941), wherein the amino acid sequence is present immediately subsequent to position 455, numbered according to the amino acid sequence of any one of SEQ ID NO: 36, 38-55, 57, or 59.
   343. The AAV particle, of any one of the preceding embodiments, wherein the AAV capsid variant further comprises:
[0225] (i) a modification, e.g., an insertion, substitution (e.g., conservative substitution), and/or deletion, in loop I, II, VI and/or VIII; and/or
[0226] (ii) a substitution at position K449, e.g., a K449R substitution, numbered according to SEQ ID NO: 138.
   344. The AAV particle of any one of the preceding embodiments, wherein the AAV capsid variant comprises:
[0227] (i) an amino acid sequence comprising at least one, two or three modifications, e.g., substitutions (e.g., conservative substitutions), but not more than 30, 20 or 10 modifications, e.g., substitutions (e.g., conservative substitutions), relative to the amino acid sequence of SEQ ID NO: 138; or
[0228] (ii) an amino acid sequence comprising at least one, two or three, but no more than 30, 20 or 10 different amino acids relative to the amino acid sequence of SEQ ID NO: 138.
   345. The AAV particle of any one of the preceding embodiments, wherein the AAV capsid variant comprises the amino acid sequence of SEQ ID NO: 138, or an amino acid sequence with at least 80% (e.g., at least about 85, 90, 95, 96, 97, 98, or 99%) sequence identity thereto.
   346. The AAV particle of any one of the preceding embodiments, wherein the AAV capsid variant comprises the amino acid sequence of SEQ ID NO: 138.
   347. The AAV particle of any one of the preceding embodiments, wherein the AAV capsid variant comprises an amino acid sequence encoded by the nucleotide sequence of SEQ ID NO: 137, or a sequence with at least 80% (e.g., at least about 85, 90, 95, 96, 97, 98, or 99%) sequence identity thereto.
   348. The AAV particle of any one of the preceding embodiments, wherein the nucleotide sequence encoding the AAV capsid variant comprises the nucleotide sequence of SEQ ID NO: 137, or a sequence with at least 80% (e.g., at least about 85, 90, 95, 96, 97, 98, or 99%) sequence identity thereto.
   349. The AAV particle of any one of the preceding embodiments, wherein the AAV capsid variant comprises a VP1 protein, a VP2 protein, a VP3 protein, or a combination thereof.
   350. The AAV particle of any one of embodiments 1-349, wherein the AAV capsid variant comprises the amino acid sequence corresponding to positions 138-742, e.g., a VP2, of SEQ ID NO: 981 or 982, or a sequence with at least 80% (e.g., at least about 85, 90, 95, 96, 97, 98, or 99%) sequence identity thereto.
   351. The AAV particle of any one of embodiments 1-349, wherein the AAV capsid variant comprises the amino acid sequence corresponding to positions 203-742, e.g., a VP3, of SEQ ID NO: 981 or 982, or a sequence with at least 80% (e.g., at least about 85, 90, 95, 96, 97, 98, or 99%) sequence identity thereto.
   352. The AAV particle of any one of embodiments 1-349, wherein the AAV capsid variant comprises the amino acid sequence corresponding to positions 138-736, e.g., a VP2, of SEQ ID NO: 138, or a sequence with at least 80% (e.g., at least about 85, 90, 95, 96, 97, 98, or 99%) sequence identity thereto.
   353. The AAV particle of any one of embodiments 1-349, wherein the AAV capsid variant comprises the amino acid sequence corresponding to positions 203-736, e.g., a VP3, of SEQ ID NO: 138, or a sequence with at least 80% (e.g., at least about 85, 90, 95, 96, 97, 98, or 99%) sequence identity thereto.
   354. The AAV particle of any one of embodiments 1-23, 26-29, 32, 35-43, 46-51, 54-71, 79-89, 94-99, 102-104, 100-112, 115-164, 203-209, 212, 216-224, 234-243, 248-250, 253-270, 276, 277, 281, 282, 286-288, 299, 301, 303-309, or 343, wherein the AAV capsid variant comprises an amino acid sequence comprising at least 3, 4, 5, or 6 consecutive amino acids from the amino acid sequence of SPHSKA (SEQ ID NO: 941), wherein:
[0229] (i) the 3 consecutive amino acids comprise SPH;
[0230] (ii) the 4 consecutive amino acids comprise SPHS (SEQ ID NO: 6616);
[0231] (iii) the 5 consecutive amino acids comprise SPHSK (SEQ ID NO: 6617); or
[0232] (iv) the 6 consecutive amino acids comprise SPHSKA (SEQ ID NO: 941);
[0233] wherein the AAV capsid variant comprises: (a) a VP1 protein comprising the amino acid sequence of SEQ ID NO: 138 or SEQ ID NO: 981; (b) a VP2 protein comprising the amino acid sequence of positions 138-736 of SEQ ID NO: 138 or positions 138-742 of SEQ ID NO: 981; (c) a VP3 protein comprising the amino acid sequence of positions 203-736 of SEQ ID NO: 138 or positions 203-742 of SEQ ID NO: 981; or (d) an amino acid sequence with at least 90% (e.g., at least about 95, 96, 97, 98, or 99%) sequence identity to any of the amino acid sequences in (a)-(c).
   355. The AAV particle of any one of embodiments 1-23, 26-29, 32, 35-43, 46-51, 54-71, 79-89, 94-99, 102-104, 100-112, 115-164, 203-209, 212, 216-224, 234-243, 248-250, 253-270, 276, 277, 281, 282, 286-288, 299, 301, 303-309, 343, or 354, wherein the AAV capsid variant comprises an amino acid sequence comprising at least 3, 4, 5, or 6 consecutive amino acids from the amino acid sequence of SPHSKA (SEQ ID NO: 941), wherein:
[0234] (i) the 3 consecutive amino acids comprise SPH;
[0235] (ii) the 4 consecutive amino acids comprise SPHS (SEQ ID NO: 6616);
[0236] (iii) the 5 consecutive amino acids comprise SPHSK (SEQ ID NO: 6617); or
[0237] (iv) the 6 consecutive amino acids comprise SPHSKA (SEQ ID NO: 941);
[0238] wherein the AAV capsid variant comprises an amino acid sequence at least 90% (e.g., at least about 95, 96, 97, 98, or 99%) identical to the amino acid sequence of SEQ ID NO: 981.
   356. The AAV particle of any one of embodiments 1-23, 26-29, 32, 35-43, 46-51, 54-71, 79-89, 94-99, 102-104, 100-112, 115-164, 203-209, 212, 216-224, 234-243, 248-250, 253-270, 276, 277, 281, 282, 286-288, 299, 301, 303-309, 343, 354, or 355, wherein the AAV capsid variant comprises one or two, but no more than three substitutions relative to the amino acid sequence of SPHSKA (SEQ ID NO: 941), wherein the AAV capsid variant comprises:
[0239] (a) a VP1 protein comprising the amino acid sequence of SEQ ID NO: 138 or SEQ ID NO: 981;
[0240] (b) a VP2 protein comprising the amino acid sequence of positions 138-736 of SEQ ID NO: 138 or positions 138-742 of SEQ ID NO: 981;
[0241] (c) a VP3 protein comprising the amino acid sequence of positions 203-736 of SEQ ID NO: 138 or positions 203-742 of SEQ ID NO: 981; or
[0242] (d) an amino acid sequence with at least 90% (e.g., at least about 95, 96, 97, 98, or 99%) sequence identity to any of the amino acid sequences in (a)-(c).
   357. The AAV particle of any one of embodiments 1-23, 26-29, 32, 35-43, 46-51, 54-71, 79-89, 94-99, 102-104, 100-112, 115-164, 203-209, 212, 216-224, 234-243, 248-250, 253-270, 276, 277, 281, 282, 286-288, 299, 301, 303-309, 343, or 354-356, wherein the AAV capsid variant comprises one or two, but no more than three substitutions relative to the amino acid sequence of SPHSKA (SEQ ID NO: 941), wherein the AAV capsid variant comprises an amino acid sequence at least 90% (e.g., at least about 95, 96, 97, 98, or 99%) identical to the amino acid sequence of SEQ ID NO: 138 or SEQ ID NO: 981.
   358. The AAV particle of any one of embodiments 354-357, wherein the amino acid sequence is present immediately subsequent to position 455, numbered according to SEQ ID NO: 138 or 981.
   359. The AAV particle of any one of embodiments 1-9, 11, 12-22, 24, 26, 28, 30, 33, 35-42, 44, 46-50, 52, 54-78, 83-88, 90-98, 100-103, 105-111, 113-129, 165-211, 213-222, 226-242, 245-249, 251-266, 271-274, 276, 278, 280, 281, 283, 285, 286, 289, 290, 300, 302-307, 329-333, or 343, wherein the AAV capsid variant comprises an amino acid sequence comprising at least 3, 4, 5, or 6 consecutive amino acids from the amino acid sequence of HDSPHK (SEQ ID NO: 2), wherein:
[0243] (i) the 3 consecutive amino acids comprise HDS;
[0244] (ii) the 4 consecutive amino acids comprise HDSP (SEQ ID NO: 6618);
[0245] (iii) the 5 consecutive amino acids comprise HDSPH (SEQ ID NO: 6619); or
[0246] (iv) the 6 consecutive amino acids comprise HDSPHK (SEQ ID NO: 2);
[0247] wherein the AAV capsid variant comprises: (a) a VP1 protein comprising the amino acid sequence of SEQ ID NO: 138 or SEQ ID NO: 982; (b) a VP2 protein comprising the amino acid sequence of positions 138-736 of SEQ ID NO: 138 or positions 138-742 of SEQ ID NO: 982; (c) a VP3 protein comprising the amino acid sequence of positions 203-736 of SEQ ID NO: 138 or positions 203-742 of SEQ ID NO: 982; or (d) an amino acid sequence with at least 90% (e.g., at least about 95, 96, 97, 98, or 99%) sequence identity to any of the amino acid sequences in (a)-(c).
   360. The AAV particle of any one of embodiments 1-9, 11, 12-22, 24, 26, 28, 30, 33, 35-42, 44, 46-50, 52, 54-78, 83-88, 90-98, 100-103, 105-111, 113-129, 165-211, 213-222, 226-242, 245-249, 251-266, 271-274, 276, 278, 280, 281, 283, 285, 286, 289, 290, 300, 302-307, 329-333, 343, or 359, wherein the AAV capsid variant comprises an amino acid sequence comprising at least 3, 4, 5, or 6 consecutive amino acids from the amino acid sequence of HDSPHK (SEQ ID NO: 2), wherein:
[0248] (i) the 3 consecutive amino acids comprise HDS;
[0249] (ii) the 4 consecutive amino acids comprise HDSP (SEQ ID NO: 6618);
[0250] (iii) the 5 consecutive amino acids comprise HDSPH (SEQ ID NO: 6619); or
[0251] (iv) the 6 consecutive amino acids comprise HDSPHK (SEQ ID NO: 2);
[0252] wherein the AAV capsid variant comprises an amino acid sequence at least 90% (e.g., at least about 95, 96, 97, 98, or 99%) identical to the amino acid sequence of SEQ ID NO: 982.
   361. The AAV particle of any one of embodiments 1-9, 11, 12-22, 24, 26, 28, 30, 33, 35-42, 44, 46-50, 52, 54-78, 83-88, 90-98, 100-103, 105-111, 113-129, 165-211, 213-222, 226-242, 245-249, 251-266, 271-274, 276, 278, 280, 281, 283, 285, 286, 289, 290, 300, 302-307, 329-333, 343, 359, or 360, wherein the AAV capsid variant comprises one or two, but no more than three substitutions relative to the amino acid sequence of HDSPHK (SEQ ID NO: 2), wherein the AAV capsid variant comprises:
[0253] (a) a VP1 protein comprising the amino acid sequence of SEQ ID NO: 138 or SEQ ID NO: 982;
[0254] (b) a VP2 protein comprising the amino acid sequence of positions 138-736 of SEQ ID NO: 138 or positions 138-742 of SEQ ID NO: 982;
[0255] (c) a VP3 protein comprising the amino acid sequence of positions 203-736 of SEQ ID NO: 138 or positions 203-742 of SEQ ID NO: 982; or
[0256] (d) an amino acid sequence with at least 90% (e.g., at least about 95, 96, 97, 98, or 99%) sequence identity to any of the amino acid sequences in (a)-(c).
   362. The AAV particle of any one of embodiments 1-9, 11, 12-22, 24, 26, 28, 30, 33, 35-42, 44, 46-50, 52, 54-78, 83-88, 90-98, 100-103, 105-111, 113-129, 165-211, 213-222, 226-242, 245-249, 251-266, 271-274, 276, 278, 280, 281, 283, 285, 286, 289, 290, 300, 302-307, 329-333, 343, 359-361, wherein the AAV capsid variant comprises one or two, but no more than three substitutions relative to the amino acid sequence of HDSPHK (SEQ ID NO: 2), wherein the AAV capsid variant comprises an amino acid sequence at least 90% (e.g., at least about 95, 96, 97, 98, or 99%) identical to the amino acid sequence of SEQ ID NO: 982.
   363. The AAV particle of any one of embodiments 359-362, wherein the amino acid sequence is present immediately subsequent to position 453, numbered according to SEQ ID NO: 138 or 982.
   364. The AAV particle of any one of embodiments 1-362, wherein the AAV capsid variant comprises the amino acid sequence of any one of SEQ ID NO: 981 or 982, or an amino acid sequence with at least 80% (e.g., at least about 85, 90, 95, 96, 97, 98, or 99%) sequence identity thereto.
   365. The AAV particle of any one of embodiments 1-364, wherein the AAV capsid variant comprises an amino acid sequence comprising at least one, two or three modifications, e.g., substitutions (e.g., conservative substitutions), but not more than 30, 20 or 10 modifications, e.g., substitutions (e.g., conservative substitutions), relative to the amino acid sequence of SEQ ID NO: 981 or 982.
   366. The AAV particle of any one of embodiments, 1-365, wherein the AAV capsid variant comprises an amino acid sequence comprising at least one, two or three, but not more than 30, 20 or 10 different amino acids, relative to the amino acid sequence of SEQ ID NO: 981 or 982.
   367. The AAV particle of any one of embodiments 1-23, 26-29, 32, 35-43, 46-51, 54-71, 79-89, 94-99, 102-104, 100-112, 115-, 164, 203-, 209, 212, 216-, 224, 234-, 243, 248-, 250, 253-, 270, 276, 277, 281, 282, 286-288, 299, 301, 303-309, 343, 354-357, or 364-366, wherein the AAV capsid variant comprises the amino acid sequence of SEQ ID NO: 981, or an amino acid sequence with at least 80% (e.g., at least about 85, 90, 95, 96, 97, 98, or 99%) sequence identity thereto.
   368. The AAV particle of any one of embodiments 1-23, 26-29, 32, 35-43, 46-51, 54-71, 79-89, 94-99, 102-104, 100-112, 115-164, 203-209, 212, 216-224, 234-243, 248-250, 253-270, 276, 277, 281, 282, 286-288, 299, 301, 303-309, 343, 354-357, or 364-367, wherein the AAV capsid variant comprises an amino acid sequence comprising at least one, two or three modifications, e.g., substitutions (e.g., conservative substitutions), but not more than 30, 20 or 10 modifications, e.g., substitutions (e.g., conservative substitutions), relative to the amino acid sequence of SEQ ID NO: 981.
   369. The AAV particle of any one of embodiments 1-23, 26-29, 32, 35-43, 46-51, 54-71, 79-89, 94-99, 102-104, 100-112, 115-164, 203-209, 212, 216-224, 234-243, 248-250, 253-270, 276, 277, 281, 282, 286-288, 299, 301, 303-309, 343, 354-357, or 364-368, wherein the AAV capsid variant comprises an amino acid sequence comprising at least one, two or three, but not more than 30, 20 or 10 different amino acids, relative to the amino acid sequence of SEQ ID NO: 981.
   370. The AAV particle of any one of embodiments 1-9, 11, 12-22, 24, 26, 28, 30, 33, 35-42, 44, 46-50, 52, 54-78, 83-88, 90-98, 100-103, 105-111, 113-129, 165-211, 213-222, 226-242, 245-249, 251-266, 271-274, 276, 278, 280, 281, 283, 285, 286, 289, 290, 300, 302-307, 329-333, 343, or 359-366, wherein the AAV capsid variant comprises the amino acid sequence of SEQ ID NO: 982, or an amino acid sequence with at least 80% (e.g., at least about 85, 90, 95, 96, 97, 98, or 99%) sequence identity thereto.
   371. The AAV particle of any one of embodiments 1-9, 11, 12-22, 24, 26, 28, 30, 33, 35-42, 44, 46-50, 52, 54-78, 83-88, 90-98, 100-103, 105-111, 113-129, 165-211, 213-222, 226-242, 245-249, 251-266, 271-274, 276, 278, 280, 281, 283, 285, 286, 289, 290, 300, 302-307, 329-333, 343, 359-366, or 370, wherein the AAV capsid variant comprises an amino acid sequence comprising at least one, two or three modifications, e.g., substitutions (e.g., conservative substitutions), but not more than 30, 20 or 10 modifications, e.g., substitutions (e.g., conservative substitutions), relative to the amino acid sequence of SEQ ID NO: 982.
   372. The AAV particle of any one of embodiments 1-9, 11, 12-22, 24, 26, 28, 30, 33, 35-42, 44, 46-50, 52, 54-78, 83-88, 90-98, 100-103, 105-111, 113-129, 165-211, 213-222, 226-242, 245-249, 251-266, 271-274, 276, 278, 280, 281, 283, 285, 286, 289, 290, 300, 302-307, 329-333, 343, 359-366, 370, or 371, wherein the AAV capsid variant comprises an amino acid sequence comprising at least one, two or three, but not more than 30, 20 or 10 different amino acids, relative to the amino acid sequence of SEQ ID NO: 982.
   373. The AAV particle of any one of embodiments 1-372, wherein the AAV capsid variant comprises an amino acid sequence encoded by the nucleotide sequence of SEQ ID NO: 983 or 984, or a nucleotide sequence with at least 80% (e.g., at least about 85, 90, 95, 96, 97, 98, or 99%) sequence identity thereto.
   374. The AAV particle of any one of the preceding embodiments 1-373, wherein the nucleotide sequence encoding the AAV capsid variant comprises the nucleotide sequence of SEQ ID NOs: 983 or 984, or a nucleotide sequence with at least 80% (e.g., at least about 85, 90, 95, 96, 97, 98, or 99%) sequence identity thereto.
   375. The AAV particle of any one of the preceding embodiments 1-23, 26-29, 32, 35-43, 46-51, 54-71, 79-89, 94-99, 102-104, 100-112, 115-164, 203-209, 212, 216-224, 234-243, 248-250, 253-270, 276, 277, 281, 282, 286-288, 299, 301, 303-309, 343, 354-357, 364-369, 373, or 374, wherein the nucleotide sequence encoding the AAV capsid variant comprises the nucleotide sequence of SEQ ID NO: 983, or a nucleotide sequence with at least 80% (e.g., at least about 85, 90, 95, 96, 97, 98, or 99%) sequence identity thereto.
   376. The AAV particle of any one of the preceding embodiments 1-9, 11, 12-22, 24, 26, 28, 30, 33, 35-42, 44, 46-50, 52, 54-78, 83-88, 90-98, 100-103, 105-111, 113-129, 165-211, 213-222, 226-242, 245-249, 251-266, 271-274, 276, 278, 280, 281, 283, 285, 286, 289, 290, 300, 302-307, 329-333, 343, 359-366, 370, or 371-374, wherein the nucleotide sequence encoding the AAV capsid variant comprises the nucleotide sequence of SEQ ID NO: 984, or a nucleotide sequence with at least 80% (e.g., at least about 85, 90, 95, 96, 97, 98, or 99%) sequence identity thereto.
   377. The AAV particle of any one of the preceding embodiments, wherein the nucleotide sequence encoding the AAV capsid variant is codon optimized.
   378. An AAV particle comprising an AAV capsid variant and a nucleic acid comprising a transgene encoding an antibody molecule which binds to HER2/neu (e.g., human HER2/neu), wherein AAV capsid variant comprising the amino acid sequence of SEQ ID NO: 981.
   379. The AAV particle of embodiment 378, wherein the nucleotide sequence encoding the AAV capsid variant comprises the nucleotide sequence of SEQ ID NO: 983, or a nucleotide sequence at least 90%, 95%, or 99% identical thereto.
   380. An AAV particle comprising an AAV capsid variant and a nucleic acid comprising a transgene encoding an antibody molecule which binds to HER2/neu (e.g., human HER2/neu), wherein AAV capsid variant comprising the amino acid sequence of SEQ ID NO: 982.
   381. The AAV particle of embodiment 380, wherein the nucleotide sequence encoding the AAV capsid variant comprises the nucleotide sequence of SEQ ID NO: 984, or a nucleotide sequence at least 90%, 95%, or 99% identical thereto.
   382. An AAV particle comprising an AAV capsid variant and a nucleic acid comprising a transgene encoding an antibody molecule which binds to HER2/neu (e.g., human HER2/neu), wherein the AAV capsid variant comprises the amino acid sequence of any one of SEQ ID NOs: 36-59.
   383. An AAV particle comprising an AAV capsid variant and a nucleic acid comprising a transgene encoding an antibody molecule which binds to HER2/neu (e.g., human HER2/neu), comprising an amino acid sequence encoded by the nucleotide sequence of any one of SEQ ID NOs: 6553-6556 or 16-35, or a nucleotide sequence at least 95% identical thereto.
   384. The AAV particle of embodiment 382 or 383, wherein the nucleotide sequence encoding the AAV capsid variant comprises the nucleotide sequence of any one of SEQ ID NOs: 6553-6556 or 16-35, or a nucleotide sequence at least 95% identical thereto.
   385. The AAV particle of any one of the preceding embodiments, wherein the AAV capsid variant has an increased tropism for a CNS cell or tissue, e.g., a brain cell, brain tissue, spinal cord cell, or spinal cord tissue, relative to the tropism of a reference sequence comprising the amino acid sequence of SEQ ID NO: 138.
   386. The AAV particle of any one of embodiments 1-385, wherein the AAV capsid variant transduces a brain region, e.g., a midbrain region (e.g., the hippocampus, or thalamus) or the brain stem, optionally wherein the level of transduction is at least 5, 10, 15, 20, 25, 30, 35, 40, 45, 50, 55, 60, or 65-fold greater as compared to a reference sequence of SEQ ID NO: 138, e.g., when measured by an assay, e.g., an immunohistochemistry assay or a qPCR assay, e.g., as described in Example 11.
   387. The AAV particle of any one of embodiments 1-386, wherein the AAV capsid variant transduces a brain region, e.g., a midbrain region (e.g., the hippocampus, or thalamus) or the brain stem, optionally wherein the level of transduction is at least 30, 35, 40, 45, 50, 55, 60, or 65-fold greater as compared to a reference sequence of SEQ ID NO: 138, e.g., when measured by an assay, e.g., an immunohistochemistry assay or a qPCR assay, e.g., as described in Example 11.
   388. The AAV particle of any one of embodiments 1-387, wherein the AAV capsid variant is enriched at least about 3, 4, 5, 6, 7, 8, 9, or 10-fold, in the brain compared to a reference sequence of SEQ ID NO: 138, e.g., when measured by an assay as described in Example 10.
   389. The AAV particle of any one of embodiments 1-388, wherein the AAV capsid variant is enriched at least about 20, 25, 30, 35, 40, 45, 50, 55, 60, 65, 70, 75, 80 or 85-fold, in the brain compared to a reference sequence of SEQ ID NO: 138, e.g., when measured by an assay as described in Example 10.
   390. The AAV particle of any one of embodiments 1-389, wherein the AAV capsid variant is enriched in the brain of at least two to three species, e.g., a non-human primate and rodent (e.g., mouse), e.g., as compared to a reference sequence of SEQ ID NO: 138.
   391. The AAV particle of any one of embodiments 1-390, wherein the AAV capsid variant is enriched at least about 10, 15, 20, 25, 30, 35, 40, 45, 50, 55, 60, 65, 70, 75, 80, 85, 90, 95, 100, 105, 115, 120, 125, 130, 135, 140, 145, 150, 155, 160, 165, 170, 175, 180, 190, 200, 205, or 210-fold, in the brain of at least two to three species, e.g., a non-human primate and rodent (e.g., mouse), compared to a reference sequence of SEQ ID NO: 138, e.g., when measured by an assay as described in Example 10 or 13.
   392. The AAV particle of embodiment 390 or 391, wherein the at least two to three species are Macaca fascicularis, Chlorocebus sabaeus, Callithrix jacchus, and/or mouse (e.g., BALB/c mice, C57Bl/6 mice, and/or CD-1 outbred mice).
   393. The AAV particle of any one of embodiments 1-392, wherein the AAV capsid variant delivers an increased level of a payload to a brain region, optionally wherein the level of the payload is increased by at least 10, 12, 15, 20, 25, 30, 35, 40, 45, 50, 55, 60, 65, or 70-fold, as compared to a reference sequence of SEQ ID NO: 138, e.g., when measured by an assay, e.g., a qRT-PCR or a qPCR assay (e.g., as described in Example 11 or 17).
   394. The AAV particle of any one of embodiments 1-393, wherein the AAV capsid variant delivers an increased level of viral genomes to a brain region, optionally wherein the level of viral genomes is increased by at least 5, 10, 15, 17, 18, 19, 20, 25, 30, 35, 40, 45, or 50-fold, as compared to a reference sequence of SEQ ID NO: 138, e.g., when measured by an assay, e.g., a qRT-PCR or a qPCR assay (e.g., as described in Example 11 or 17).
   395. The AAV particle of embodiment 393 or 394, wherein the brain region is a midbrain region (e.g., the hippocampus or thalamus), frontal cortex, temporal cortex, motor cortex, cerebral cortex, caudate, putamen, dentate nucleus, substantia nigra, or the brainstem.
   396. The AAV particle of any one of embodiments 1-395, wherein the AAV capsid variant is enriched at least about 5, 10, 15, 20, 25, 30, or 35-fold, in the spinal cord compared to a reference sequence of SEQ ID NO: 138, e.g., when measured by an assay as described in Example 10 or 17, optionally wherein the region of the spinal cord is a thoracic spinal cord region, cervical spinal cord region, C5 ventral horn region, lumbar spinal cord region, or L5 ventral horn region.
   397. The AAV particle of any one of embodiments 1-396, wherein the AAV capsid variant shows preferential transduction in a brain region relative to the transduction in the dorsal root ganglia (DRG).
   398. The AAV particle of any one of embodiments 1-397, wherein the AAV capsid variant shows preferential transduction in a brain region relative to the liver.
   399. The AAV particle of any one of embodiments 1-398, wherein the AAV capsid variant shows preferential transduction in a brain region relative to the transduction in the heart.
   400. The AAV particle of any one of embodiments 1-399, wherein the AAV capsid variant shows preferential transduction in a brain region relative to the transduction in the dorsal root ganglia (DRG) and the heart.
   401. The AAV particle of any one of the preceding embodiments, wherein the AAV capsid variant is capable of transducing non-neuronal cells, e.g., glial cells (e.g., oligodendrocytes or astrocytes).
   402. The AAV particle of embodiment 401, wherein the non-neuronal cells comprise glial cells, oligodendrocytes (e.g., Olig2 positive oligodendrocytes), or astrocytes (e.g., Olig2 positive astrocytes).
   403. The AAV particle of any one of the preceding embodiments, wherein the AAV capsid variant is capable of transducing Olig2 positive cells, e.g., Olig2 positive astrocytes or Olig2 positive oligodendrocytes, e.g., as measured by an assay as described in Example 15.
   404. The recombinant AAV particle of any one of the preceding embodiments, wherein the encoded antibody molecule binds domain I of HER2, domain II of HER2, domain III of HER2, and/or domain IV of HER2.
   405. The recombinant AAV particle of any one of the preceding embodiments, wherein the encoded antibody molecule binds domain IV of HER2.
   406. The recombinant AAV particle of any one of embodiments 1-405, wherein the encoded antibody molecule binds domain IT of HER2.
   407. The AAV particle of any one of the preceding embodiments, wherein the encoded antibody molecule comprises:
[0257] (i) a heavy chain variable region comprising one, two, or three HC CDR sequence of any of the CDR sequences of Table 3A-3C; and/or
[0258] (ii) a light chain variable region comprising one, two, or three LC CDR sequence of any of the CDR sequences of Table 3A-3C.
   408. The AAV particle of any one of embodiments 1-407, wherein the encoded antibody comprises at least 1-4, e.g., at least one, two, three, or four, modifications, e.g., substitutions, in a HC CDR3 region, e.g., an HC CDR3 according to SEQ ID NO: 5001.
   409. The AAV particle of any one of embodiments 1-408, wherein the encoded heavy chain variable region or the encoded heavy chain comprises:
[0259] (i) an amino acid substitution at one, two, three, or all of positions 102 (e.g., D102W), 107 (e.g., M107F), 108 (e.g., D108A), and/or 109 (e.g., Y109L), numbered according to the amino acid sequence of SEQ ID NO: 5001;
[0260] (ii) one, two, three, or all of an amino acid other than D at position 102, an amino acid other than M at position 107, an amino acid other than D at position 108, and/or an amino acid other than Y at position 109, numbered according to the amino acid sequence of SEQ ID NO: 5001; or
[0261] (iii) one, two, three or all of the amino acid W at position 102, the amino acid F at position 107, A at position 108, and/or L at position 109, numbered according to the amino acid sequence of SEQ ID NO: 5001.
   410. The AAV particle of any one of embodiments 1-409, wherein the encoded heavy chain variable region or the encoded heavy chain comprises:
[0262] (a) the amino acid W at position 102, the amino acid F at position 107, the amino acid A position 108, and the amino acid L at position 109, relative to a reference sequence numbered according to the amino acid sequence of SEQ ID NO: 5001;
[0263] (b) the amino acid W at position 102, the amino acid F at position 107, and the amino acid A position 108, relative to a reference sequence numbered according to the amino acid sequence of SEQ ID NO: 5001;
[0264] (c) the amino acid W at position 102, the amino acid F at position 107, and the amino acid L at position 109, relative to a reference sequence numbered according to the amino acid sequence of SEQ ID NO: 5001;
[0265] (d) the amino acid W at position 102, the amino acid A position 108, and the amino acid L at position 109, relative to a reference sequence numbered according to the amino acid sequence of SEQ ID NO: 5001;
[0266] (e) the amino acid F at position 107, the amino acid A position 108, and the amino acid L at position 109, relative to a reference sequence numbered according to the amino acid sequence of SEQ ID NO: 5001.
   411. The AAV particle of any one of embodiments 1-410, wherein the encoded heavy chain variable region or the encoded heavy chain comprises:
[0267] (i) the amino acid substitutions D98W, M100F, D101A, and Y102L, numbered according to Kabat;
[0268] (ii) the amino acid substitutions D98W, M100F, and D101A, numbered according to Kabat;
[0269] (iii) the amino acid substitutions D98W, M100F, and Y102L, numbered according to Kabat;
[0270] (iv) the amino acid substitutions D98W, D101A, and Y102L, numbered according to Kabat;
[0271] (v) the amino acid substitutions M100F, D101A, and Y102L, numbered according to Kabat.
   412. The AAV particle of any one of embodiments 1-411, wherein the encoded heavy chain variable region or the encoded heavy chain comprises an HC CDR1, a HC CDR2, a HC CDR3, wherein:
[0272] (i) the HC CDR1, HC CDR2, HC CDR3 comprise the sequences of SEQ ID NO: 5281, 5282, 6510, respectively;
[0273] (ii) the HC CDR1, HC CDR2, HC CDR3 comprise the sequences of SEQ ID NO: 5281, 5282, 6515, respectively;
[0274] (iii) the HC CDR1, HC CDR2, HC CDR3 comprise the sequences of SEQ ID NO: 5281, 5282, 6520, respectively;
[0275] (iv) the HC CDR1, HC CDR2, HC CDR3 comprise the sequences of SEQ ID NO: 5281, 5282, 6525, respectively; or
[0276] (v) the HC CDR1, HC CDR2, HC CDR3 comprise the sequences of SEQ ID NO: 5281, 5282, 6530, respectively.
   413. The AAV particle of any one of embodiments 1-412, wherein the encoded antibody comprises:
[0277] (i) a heavy chain variable region comprising a HC CDR1 amino acid sequence of SEQ ID NO: 5281, a HC CDR2 amino acid sequence of SEQ ID NO: 5282, and an HC CDR3 amino acid sequence of SEQ ID NO: 5283, 6510, 6515, 6520, 6525 or 6530; and
[0278] (ii) a light chain variable region comprising an LC CDR1 amino acid sequence of SEQ ID NO: 5287, an LC CDR2 amino acid sequence of SEQ ID NO: 5288, and an LC CDR3 amino acid sequence of SEQ ID NO: 5289.
   414. The AAV particle of any one of embodiments 1-413, wherein the encoded antibody comprises:
[0279] (i) a heavy chain variable region comprising a HC CDR1 amino acid sequence of SEQ ID NO: 5284, a HC CDR2 amino acid sequence of SEQ ID NO: 5285, and an HC CDR3 amino acid sequence of SEQ ID NO: 5286; and
[0280] (ii) a light chain variable region comprising an LC CDR1 amino acid sequence of SEQ ID NO: 5287, an LC CDR2 amino acid sequence of SEQ ID NO: 5291, and an LC CDR3 amino acid sequence of SEQ ID NO: 5292;
[0281] or a sequence substantially identical (e.g., having at least 70%, 75%, 80%, 85%, 90%, 95%, or 99% sequence identity) to the any of the aforesaid sequences.
   415. The AAV particle of any one of embodiments 1-414, wherein the encoded antibody comprises:
[0282] (i) a HC CDR1, a HC CDR2, a HC CDR3, a LC CDR1, a LC CDR2 and an LC CDR3 comprising the amino acid sequences of SEQ ID NO: 5281, 5282, 6510, 5287, 5288, and 5289, respectively;
[0283] (ii) a HC CDR1, a HC CDR2, a HC CDR3, a LC CDR1, a LC CDR2 and an LC CDR3 comprising the amino acid sequences of SEQ ID NO: 5281, 5282, 6515, 5287, 5288, and 5289, respectively;
[0284] (iii) a HC CDR1, a HC CDR2, a HC CDR3, a LC CDR1, a LC CDR2 and an LC CDR3 comprising the amino acid sequences of SEQ ID NO: 5281, 5282, 6530, 5287, 5288, and 5289, respectively;
[0285] (iv) a HC CDR1, a HC CDR2, a HC CDR3, a LC CDR1, a LC CDR2 and an LC CDR3 comprising the amino acid sequences of SEQ ID NO: 5281, 5282, 6530, 5287, 5288, and 5289, respectively.
   416. The AAV particle of any one of embodiments 1-415, wherein the encoded antibody molecule comprises:
[0286] (i) a heavy chain variable region (VH) comprising an amino acid sequence of any of the VH sequences of Table 3A-3C, or a sequence having at least 80% (e.g., 85, 90, 95, 96, 97, 98, or 99%) sequence identity to any of the VH sequences of Table 3A-3C; and/or
[0287] (ii) a light chain variable region (VL) comprising an amino acid sequence of any of the VL sequences of Table 3A-3C, or a sequence having at least 80% (e.g., 85, 90, 95, 96, 97, 98, or 99%) sequence identity to any of the VL sequences of Table 3A-3C.
   417. The AAV particle of any one of embodiments 1-416, wherein the encoded antibody comprises a heavy chain variable region comprising an amino acid selected from SEQ ID NO: 5001, 5367, 5172, 5106, 5010, 5069, 5192, 5224, 5090, 5110, 5254, 5258, 5130, 5262, 5270, 5326, 6511, 6516, 6521, 6526, 6531, 6536, 6539, 6542, 6545, or 6548, or a sequence at least about 80%, 85%, 90%, 92%, 95%, 97%, 98%, or 99% identical thereto.
   418. The AAV particle of any one of embodiments 1-417, wherein the encoded antibody comprises:
[0288] (i) a heavy chain variable region comprising the amino acid sequence of SEQ ID NO: 5270, 6511, 6516, 6521, 6526 or 6531, or a sequence substantially identical (e.g., having at least 70%, 75%, 80%, 85%, 90%, 95%, or 99% sequence identity) thereto; and/or
[0289] (i) a light chain variable region comprising the amino acid sequence of SEQ ID NO: 5274, or a sequence substantially identical (e.g., having at least 70%, 75%, 80%, 85%, 90%, 95%, or 99% sequence identity) thereto.
   419. The AAV particle of any one of embodiments 1-418, wherein the encoded antibody molecule comprises:
[0290] (i) a heavy chain constant region comprising an amino acid sequence of any of the heavy chain constant region sequences of Table 3A-3C or 20, or a sequence having at least 80% (e.g., 85, 90, 95, 96, 97, 98, or 99%) sequence identity to the heavy chain constant region sequences of Table 3A-3C or 20; and/or
[0291] (ii) a light chain constant region (CL) comprising an amino acid sequence of any of the CL sequences of Table 3A-3C or 20, or a sequence having at least 80% (e.g., 85, 90, 95, 96, 97, 98, or 99%) sequence identity to any of the CL sequences of Table 3A-3C or 20.
   420. The AAV particle of any one of embodiments 1-419, wherein the encoded antibody molecule comprises:
[0292] (i) a heavy chain comprising an amino acid sequence of any of the heavy chain sequences of Table 3A-3C, or a sequence having at least 80% (e.g., 85, 90, 95, 96, 97, 98, or 99%) sequence identity to any of the heavy chain sequences of Table 3A-3C; and/or
[0293] (ii) a light chain comprising an amino acid sequence of any of the light chain sequences of Table 3A-3C, or a sequence having at least 80% (e.g., 85, 90, 95, 96, 97, 98, or 99%) sequence identity to any of the light chain sequences of Table 3A-3C.
   421. The AAV particle of any one of embodiments 1-420, wherein the encoded antibody comprises:
[0294] (i) a heavy chain comprising the amino acid sequence of SEQ ID NO: 5272, 7589, 6513, 6518, 6523, 6528, 6533, or a sequence substantially identical (e.g., having at least 70%, 75%, 80%, 85%, 90%, 95%, or 99% sequence identity) thereto; and/or a light chain comprising the amino acid sequence of SEQ ID NO: 5276 or a sequence substantially identical (e.g., having at least 70%, 75%, 80%, 85%, 90%, 95%, or 99% sequence identity) thereto;
[0295] (ii) a heavy chain comprising the amino acid sequence of SEQ ID NO: 5272, or a sequence substantially identical (e.g., having at least 70%, 75%, 80%, 85%, 90%, 95%, or 99% sequence identity) thereto; and/or a light chain comprising the amino acid sequence of SEQ ID NO: 5276 or a sequence substantially identical (e.g., having at least 70%, 75%, 80%, 85%, 90%, 95%, or 99% sequence identity) thereto; or
[0296] (iii) a heavy chain comprising the amino acid sequence of SEQ ID NO: 7589, or a sequence substantially identical (e.g., having at least 70%, 75%, 80%, 85%, 90%, 95%, or 99% sequence identity) thereto; and/or a light chain comprising the amino acid sequence of SEQ ID NO: 5276 or a sequence substantially identical (e.g., having at least 70%, 75%, 80%, 85%, 90%, 95%, or 99% sequence identity) thereto.
   422. The AAV particle of any one of embodiments 1-421, wherein the encoded antibody molecule that binds to HER2/neu, comprises:
[0297] (i) a nucleotide sequence encoding a heavy chain variable region (VH) comprising a nucleotide sequence with at least 90% (e.g., at least about 95, 96, 97, 98, or 99%) sequence identity to the nucleotide sequence of SEQ ID NO: 5269; and
[0298] (ii) a nucleotide sequence encoding a light chain variable region (VL) comprising a nucleotide sequence with at least 90% (e.g., at least about 95, 96, 97, 98, or 99%) sequence identity to the nucleotide sequence of SEQ ID NO: 5273 or 5245.
   423. The AAV particle of embodiment 422, wherein the nucleotide sequence encoding the VH comprises the nucleotide sequence of SEQ ID NO: 5269.
   424. The AAV particle of embodiments 422 or 423, wherein the nucleotide sequence encoding the VL comprises the nucleotide sequence of SEQ ID NO: 5273 or 5245.
   425. The AAV particle of embodiments 422-424, wherein the nucleotide sequence encoding the VH comprises the nucleotide sequence of SEQ ID NO: 5269 and the nucleotide sequence encoding the VL comprises the nucleotide sequence of SEQ ID NO: 5273 or 5245.
   426. The AAV particle of any one of embodiments 422-425, wherein the encoded antibody molecule is a full-length antibody, a bispecific antibody, a Fab, a F(ab′)2, a Fv, a single chain Fv fragment (scFv), single domain antibody, or a camelid antibody.
   427. The AAV particle of any one of embodiments 422-426, wherein the encoded antibody comprises a heavy chain constant region, encoded by a nucleotide sequence having at least 90% (e.g., at least about 95, 96, 97, 98, or 99%) sequence identity to the nucleotide sequence of SEQ ID NO: 5219.
   428. The AAV particle of any one of embodiments 422-427, wherein the encoded antibody molecule comprises a light chain constant region encoded by a nucleotide sequence having at least 90% (e.g., at least about 95, 96, 97, 98, or 99%) sequence identity to the nucleotide sequence of SEQ ID NO: 5221.
   429. The AAV particle of any one of embodiments 422-428, wherein the encoded antibody molecule comprises a heavy chain encoded by a nucleotide sequence having at least 90% (e.g., at least about 95, 96, 97, 98, or 99%) sequence identity to the nucleotide sequence of SEQ ID NO: 5271, 5244, or 7590.
   430. The AAV particle of embodiment 429, wherein the nucleotide sequence encoding the heavy chain comprises the nucleotide sequence of SEQ ID NO: 5271, 5244, or 7590.
   431. The AAV particle of any one of embodiments 1-421, wherein the encoded antibody molecule that binds to HER2/ncu, comprises:
[0299] (i) a nucleotide sequence encoding a heavy chain comprising a nucleotide sequence with at least 90% (e.g., at least about 95, 96, 97, 98, or 99%) sequence identity to the nucleotide sequence of SEQ ID NO: 5271, 5244, or 7590; and
[0300] (ii) a nucleotide sequence encoding a light chain comprising a nucleotide sequence with at least 90% (e.g., at least about 95, 96, 97, 98, or 99%) sequence identity to the nucleotide sequence of SEQ ID NO: 5275 or 5246.
   432. The AAV particle of embodiment 431, wherein the nucleotide sequence encoding the heavy chain comprises the nucleotide sequence of SEQ ID NO: 5271, 5244, or 7590, and the nucleotide sequence encoding the light chain comprises the nucleotide sequence of SEQ ID NO: 5275 or 5246.
   433. The AAV particle of any one of embodiments 1-421, wherein the encoded antibody molecule that binds to HER2/neu, comprises:
[0301] (i) a nucleotide sequence encoding a heavy chain variable region (VH) comprising a nucleotide sequence with at least 90% (e.g., at least about 95, 96, 97, 98, or 99%) sequence identity to the nucleotide sequence of SEQ ID NO: 5109; and
[0302] (ii) a nucleotide sequence encoding a light chain variable region (VL) comprising a nucleotide sequence with at least 90% (e.g., at least about 95, 96, 97, 98, or 99%) sequence identity to the nucleotide sequence of SEQ ID NO: 5113.
   434. The AAV particle of embodiment 433, wherein the nucleotide sequence encoding VH comprises the nucleotide sequence of SEQ ID NO: 5109.
   435. The AAV particle of embodiments 433 or 434, wherein the nucleotide sequence encoding the VL comprises the nucleotide sequence of SEQ ID NO: 5113.
   436. The AAV particle of any one of embodiments 433-435, wherein the encoded antibody molecule is a full-length antibody, a bispecific antibody, a Fab, a F(ab′)2, a Fv, a single chain Fv fragment (scFv), single domain antibody, or a camelid antibody.
   437. The AAV particle of any one of embodiments 433-435, wherein the encoded antibody molecule comprises a heavy chain constant region encoded by a nucleotide sequence having at least 90% (e.g., at least about 95, 96, 97, 98, or 99%) sequence identity to the nucleotide sequence of SEQ ID NO: 5017.
   438. The AAV particle of any one embodiments 433-437, wherein the encoded antibody molecule comprises a light chain constant region, encoded by a nucleotide sequence having at least 90% (e.g., at least about 95, 96, 97, 98, or 99%) sequence identity to the nucleotide sequence of SEQ ID NO: 5007.
   439. The AAV particle of any one of embodiments 433-438, wherein the encoded antibody molecule comprises a heavy chain encoded by a nucleotide sequence having at least 90% (e.g., at least about 95, 96, 97, 98, or 99%) sequence identity to the nucleotide sequence of SEQ ID NO: 5111.
   440. The AAV particle of embodiment 439, wherein the nucleotide sequence encoding the heavy chain comprises the nucleotide sequence of SEQ ID NO: 5111.
   441. The AAV particle of any one of embodiments 1-421, wherein the encoded antibody molecule that binds to HER2/neu, comprises:
[0303] (i) a nucleotide sequence encoding a heavy chain comprising a nucleotide sequence with at least 90% (e.g., at least about 95, 96, 97, 98, or 99%) sequence identity to the nucleotide sequence of SEQ ID NO: 5111; and
[0304] (ii) a nucleotide sequence encoding a light chain comprising a nucleotide sequence with at least 90% (e.g., at least about 95, 96, 97, 98, or 99%) sequence identity to the nucleotide sequence of SEQ ID NO: 5115.
   442. The AAV particle of embodiment 441, wherein the nucleotide sequence encoding the heavy chain comprises the nucleotide sequence of SEQ ID NO: 5111, and the nucleotide sequence encoding the light chain comprises the nucleotide sequence of SEQ ID NO: 5115.
   443. The AAV particle of any one of embodiments 1-421, wherein the encoded antibody molecule that binds to HER2/neu comprises:
[0305] (i) a nucleotide sequence encoding a heavy chain variable region (VH) comprising a nucleotide sequence with at least 90% (e.g., at least about 95, 96, 97, 98, or 99%) sequence identity to the nucleotide sequence of SEQ ID NO: 5002; and
[0306] (ii) a nucleotide sequence encoding a light chain variable region (VL) comprising a nucleotide sequence with at least 90% (e.g., at least about 95, 96, 97, 98, or 99%) sequence identity to the nucleotide sequence of SEQ ID NO: 5005.
   444. The AAV particle of embodiment 443, wherein the nucleotide sequence encoding the VH comprises the nucleotide sequence of SEQ ID NO: 5002.
   445. The AAV particle of embodiments 443 or 444, wherein the nucleotide sequence encoding the VL comprises the nucleotide sequence of SEQ ID NO: 5005.
   446. The AAV particle of any one of embodiments 443-445, wherein the encoded antibody molecule is a full-length antibody, a bispecific antibody, a Fab, a F(ab′)2, a Fv, a single chain Fv fragment (scFv), single domain antibody, or a camelid antibody.
   447. The AAV particle of embodiment 446, wherein the antibody molecule is a scFv and the nucleotide sequence encoding the scFv comprises the nucleotide sequence of SEQ ID NO: 5352, or a nucleotide sequence with at least 90% (e.g., at least about 95, 96, 97, 98, or 99%) sequence identity thereto.
   448. The AAV particle of any one embodiments 443-446, wherein the encoded antibody molecule comprises a heavy chain constant region encoded by a nucleotide sequence having at least 80% (e.g., at least about 85, 90, 95, 96, 97, 98, or 99%) sequence identity to the nucleotide sequence of SEQ ID NO: 5003.
   449. The AAV particle of any one of embodiments 443-446, wherein the encoded antibody molecule comprises a light chain constant region encoded by a nucleotide sequence having at least 80% (e.g., at least about 85, 90, 95, 96, 97, 98, or 99%) sequence identity to the nucleotide sequence of SEQ ID NO: 5007.
   450. The AAV particle of any of the preceding embodiments, wherein the encoded antibody molecule comprises a heavy chain encoded by a nucleotide sequence having at least 90% (e.g., at least about 95, 96, 97, 98, or 99%) sequence identity to the nucleotide sequence of SEQ ID NO: 5033 or 5369.
   451. The AAV particle of embodiment 450, wherein the nucleotide sequence encoding the heavy chain comprises the nucleotide sequence of SEQ ID NO: or 5369.
   452. The AAV particle of any one of embodiments 1-421, wherein the antibody molecule that binds to HER2/neu, comprises:
[0307] (i) a nucleotide sequence encoding a heavy chain comprising a nucleotide sequence with at least 90% (e.g., at least about 95, 96, 97, 98, or 99%) sequence identity to the nucleotide sequence of SEQ ID NO: 5033; and
[0308] (ii) a nucleotide sequence encoding a light chain comprising a nucleotide sequence with at least 90% (e.g., at least about 95, 96, 97, 98, or 99%) sequence identity to the nucleotide sequence of SEQ ID NO: 5035.
   453. The AAV particle of embodiment 452, wherein the nucleotide sequence encoding the heavy chain comprises the nucleotide sequence of SEQ ID NO: 5033, and the nucleotide sequence encoding the light chain constant region comprises the nucleotide sequence of SEQ ID NO: 5035.
   454. The AAV particle of any one of embodiments 1-421, wherein the antibody molecule that binds to HER2/neu, comprises:
[0309] (i) a nucleotide sequence encoding a heavy chain variable region (VH) comprising a nucleotide sequence with at least 90% (e.g., at least about 95, 96, 97, 98, or 99%) sequence identity to the nucleotide sequence of SEQ ID NO: 5261; and
[0310] (ii) a nucleotide sequence encoding a light chain variable region (VL) comprising a nucleotide sequence with at least 90% (e.g., at least about 95, 96, 97, 98, or 99%) sequence identity to the nucleotide sequence of SEQ ID NO: 5266.
   455. The isolated nucleic acid of embodiment 454, wherein the nucleotide sequence encoding the VH is comprises the nucleotide sequence of SEQ ID NO: 5261.
   456. The isolated nucleic acid of embodiments 454 or 455, wherein the nucleotide sequence encoding the VL comprises the nucleotide sequence of SEQ ID NO: 5266.
   457. The isolated nucleic acid of any one of embodiments 454-456, wherein the encoded antibody molecule is a full-length antibody, a bispecific antibody, a Fab, a F(ab′)2, a Fv, a single chain Fv fragment (scFv), single domain antibody, or a camelid antibody.
   458. The AAV particle of any one of embodiments 454-457, wherein the encoded antibody molecule comprises a nucleotide sequence encoding a heavy chain constant region comprises a nucleotide sequence with at least 90% (e.g., at least about 95, 96, 97, 98, or 99%) sequence identity to the nucleotide sequence of SEQ ID NO: 5215.
   459. The AAV particle of any one of embodiments 454-458, wherein the encoded antibody molecule comprises a nucleotide sequence encoding a light chain constant region comprising a nucleotide sequence with at least 90% (e.g., at least about 95, 96, 97, 98, or 99%) sequence identity to the nucleotide sequence of SEQ ID NO: 5217.
   460. The AAV particle of any one of embodiments 454-459, wherein the encoded antibody molecule comprises a nucleotide sequence encoding a heavy chain comprising a nucleotide sequence with at least 90% (e.g., at least about 95, 96, 97, 98, or 99%) sequence identity to the nucleotide sequence of SEQ ID NO: 5263.
   461. The isolated nucleic acid of embodiment 460, wherein the nucleotide sequence encoding the heavy chain comprises the nucleotide sequence of SEQ ID NO: 5263.
   462. The AAV particle of any one of embodiments 1-421, wherein the encoded antibody molecule that binds to HER2/neu, comprises:
[0311] (i) a nucleotide sequence encoding a heavy chain comprising a nucleotide sequence with at least 90% (e.g., at least about 95, 96, 97, 98, or 99%) sequence identity to the nucleotide sequence of SEQ ID NO: 5263; and
[0312] (ii) a nucleotide sequence encoding a light chain comprising a nucleotide sequence with at least 90% (e.g., at least about 95, 96, 97, 98, or 99%) sequence identity to the nucleotide sequence of SEQ ID NO: 5268.
   463. The AAV particle of embodiment 462, wherein the nucleotide sequence encoding the heavy chain comprises the nucleotide sequence of SEQ ID NO: 5263, and the nucleotide sequence encoding the light chain comprises the nucleotide sequence of SEQ ID NO: 5268.
   464. The AAV particle of any one of embodiments 1-421, wherein the encoded antibody molecule that binds to HER2/neu, comprises:
[0313] (i) a nucleotide sequence encoding a heavy chain comprising a nucleotide sequence with at least 90% (e.g., at least about 95, 96, 97, 98, or 99%) sequence identity to the nucleotide sequence of SEQ ID NO: 5173, and a nucleotide sequence encoding a light chain comprising a nucleotide sequence with at least 90% (e.g., at least about 95, 96, 97, 98, or 99%) sequence identity to the nucleotide sequence of SEQ ID NO: 5177;
[0314] (ii) a nucleotide sequence encoding a heavy chain comprising a nucleotide sequence with at least 90% (e.g., at least about 95, 96, 97, 98, or 99%) sequence identity to the nucleotide sequence of SEQ ID NO: 5049, and a nucleotide sequence encoding a light chain comprising a nucleotide sequence with at least 90% (e.g., at least about 95, 96, 97, 98, or 99%) sequence identity to the nucleotide sequence of SEQ ID NO: 5051;
[0315] (iii) a nucleotide sequence encoding a heavy chain comprising a nucleotide sequence with at least 90% (e.g., at least about 95, 96, 97, 98, or 99%) sequence identity to the nucleotide sequence of SEQ ID NO: 5065, and a nucleotide sequence encoding a light chain comprising a nucleotide sequence with at least 90% (e.g., at least about 95, 96, 97, 98, or 99%) sequence identity to the nucleotide sequence of SEQ ID NO: 5067;
[0316] (iv) a nucleotide sequence encoding a heavy chain comprising a nucleotide sequence with at least 90% (e.g., at least about 95, 96, 97, 98, or 99%) sequence identity to the nucleotide sequence of SEQ ID NO: 5083, and a nucleotide sequence encoding a light chain comprising a nucleotide sequence with at least 90% (e.g., at least about 95, 96, 97, 98, or 99%) sequence identity to the nucleotide sequence of SEQ ID NO: 5087;
[0317] (v) a nucleotide sequence encoding a heavy chain comprising a nucleotide sequence with at least 90% (e.g., at least about 95, 96, 97, 98, or 99%) sequence identity to the nucleotide sequence of SEQ ID NO: 5193, and a nucleotide sequence encoding a light chain comprising a nucleotide sequence with at least 90% (e.g., at least about 95, 96, 97, 98, or 99%) sequence identity to the nucleotide sequence of SEQ ID NO: 5197;
[0318] (vi) a nucleotide sequence encoding a heavy chain comprising a nucleotide sequence with at least 90% (e.g., at least about 95, 96, 97, 98, or 99%) sequence identity to the nucleotide sequence of SEQ ID NO: 5225, and a nucleotide sequence encoding a light chain comprising a nucleotide sequence with at least 90% (e.g., at least about 95, 96, 97, 98, or 99%) sequence identity to the nucleotide sequence of SEQ ID NO: 5229;
[0319] (vii) a nucleotide sequence encoding a heavy chain comprising a nucleotide sequence with at least 90% (e.g., at least about 95, 96, 97, 98, or 99%) sequence identity to the nucleotide sequence of SEQ ID NO: 5091, and a nucleotide sequence encoding a light chain comprising a nucleotide sequence with at least 90% (e.g., at least about 95, 96, 97, 98, or 99%) sequence identity to the nucleotide sequence of SEQ ID NO: 5095; or
[0320] (viii) a nucleotide sequence encoding a heavy chain comprising a nucleotide sequence with at least 90% (e.g., at least about 95, 96, 97, 98, or 99%) sequence identity to the nucleotide sequence of SEQ ID NO: 5131, and a nucleotide sequence encoding a light chain comprising a nucleotide sequence with at least 90% (e.g., at least about 95, 96, 97, 98, or 99%) sequence identity to the nucleotide sequence of SEQ ID NO: 5135.
   465. The AAV particle of embodiment 464, wherein:
[0321] (i) the nucleotide sequence encoding the heavy chain comprises the nucleotide sequence of SEQ ID NO: 5173, and the nucleotide sequence encoding the light chain comprises the nucleotide sequence of SEQ ID NO: 5177;
[0322] (ii) the nucleotide sequence encoding the heavy chain comprises the nucleotide sequence of SEQ ID NO: 5049, and the nucleotide sequence encoding the light chain comprises the nucleotide sequence of SEQ ID NO: 5051;
[0323] (iii) the nucleotide sequence encoding the heavy chain comprises the nucleotide sequence of SEQ ID NO: 5065, and the nucleotide sequence encoding the light chain comprises the nucleotide sequence of SEQ ID NO: 5067;
[0324] (iv) the nucleotide sequence encoding the heavy chain comprises the nucleotide sequence of SEQ ID NO: 5083, and the nucleotide sequence encoding the light chain comprises the nucleotide sequence of SEQ ID NO: 5087;
[0325] (v) the nucleotide sequence encoding the heavy chain comprises the nucleotide sequence of SEQ ID NO: 5193, and the nucleotide sequence encoding the light chain comprises the nucleotide sequence of SEQ ID NO: 5197;
[0326] (vi) the nucleotide sequence encoding the heavy chain comprises the nucleotide sequence of SEQ ID NO: 5225, and the nucleotide sequence encoding the light chain comprises the nucleotide sequence of SEQ ID NO: 5229;
[0327] (vii) the nucleotide sequence encoding the heavy chain comprises the nucleotide sequence of SEQ ID NO: 5091, and the nucleotide sequence encoding the light chain comprises the nucleotide sequence of SEQ ID NO: 5095; or
[0328] (viii) the nucleotide sequence encoding the heavy chain comprises the nucleotide sequence of SEQ ID NO: 5131, and the nucleotide sequence encoding the light chain comprises the nucleotide sequence of SEQ ID NO: 5135.
   466. The AAV particle of any one of the embodiments 404-426, 433-436, 443-446 or 454-457 wherein the encoded antibody comprises an Fc region or functional variant thereof.
   467. The AAV particle of any one of embodiments 404-426, 434-436, 443-446 or 454-457 wherein the encoded antibody comprises an scFv and an Fc region.
   468. The AAV particle of embodiment 466 or 467, wherein the Fc region has reduced affinity, e.g., ablated, affinity for an Fc receptor, e.g., as compared to a reference, wherein the reference is a wild-type Fc receptor.
   469. The AAV particle of any one of embodiments 466-468, wherein the Fc region comprises a mutation at one, two, or all of positions I253 (e.g., I253A), H310 (e.g., H310A or H310Q), and/or H435 (e.g., H435A or H435Q), according to EU numbering.
   470. The AAV particle of any one of embodiments 466-469, wherein the Fc region comprises a mutation at positions I253 (e.g., I253A), H310 (e.g., H310A or H310Q), and H435 (e.g., H435A or H435Q), according to EU numbering.
   471. The AAV particle of any one of embodiments 466-469, wherein the Fc region comprises one, two, or all of the mutations I253A, H310A, and/or H435A, according to EU numbering.
   472. The AAV particle of any one of embodiments 466-469, or 471, wherein the Fc region comprises one, two, or all of A at position 253, A at position 310, and/or A at position 435, according to EU numbering.
   473. The AAV particle of any one of embodiments 466-472, wherein the Fc region comprises the mutations I253A, H310A, and H435A, according to EU numbering.
   474. The AAV particle of any one of embodiments 466-473, wherein the Fc region comprises A at position 253, A at position 310, and A at position 435, according to EU numbering.
   475. The AAV particle of embodiment 466 or 467, wherein the Fc region has reduced effector function (e.g., reduced ADCC), compared to a reference wherein the reference is a wild-type Fc receptor.
   476. The AAV particle of any one of embodiments 466-474, wherein the Fc region comprises a mutation at one, two, three, four, or all of positions L235 (e.g., L235V), F243 (e.g., F243L), R292 (e.g., R292P), Y300 (e.g., Y300L), and/or P396 (e.g., P396L), numbered according to the EU index as in Kabat.
   477. The AAV particle of any one of embodiments 466-476, wherein the Fc region comprises a mutation at positions L235 (e.g., L235V), F243 (e.g., F243L), R292 (e.g., R292P), Y300 (e.g., Y300L), and P396 (e.g., P396L), numbered according to the EU index as in Kabat.
   478. The AAV particle of any one of embodiments 466-477, wherein the Fc region comprises one, two, three, four, or all of the mutations L235V, F243L, R292P, Y300L, and/or P396L, numbered according to the EU index as in Kabat.
   479. The AAV particle of any one of embodiments 466-478, wherein the Fc region comprises one, two, three, four, or all of V at position 235, L at position 243, P at position 292, L at position 300, and/or L at position 396, numbered according to the EU index as in Kabat.
   480. The AAV particle of any one of embodiments 466-479, wherein the Fc region comprises the mutations L235V, F243L, R292P, Y300L, and P396L, numbered according to the EU index as in Kabat.
   481. The AAV particle of any one of embodiments 466-480, wherein the Fc region comprises V at position 235, L at position 243, P at position 292, L at position 300, and L at position 396, numbered according to the EU index as in Kabat.
   482. The AAV particle of any one of embodiments 466-481, wherein the Fc region comprises a mutation at L235 (e.g., L235V), F243 (e.g., F243L), R292 (e.g., R292P), Y300 (e.g., Y300L), P396 (e.g., P396L), I253 (e.g., I253A), H310 (e.g., H310A or H310Q), and H435 (e.g., H435A or H435Q), numbered according to the EU index as in Kabat.
   483. The AAV particle of any one of embodiments 466-482, wherein the Fc region comprises the mutations L235V, F243L, R292P, Y300L, P396L, I253A, H310A, and H435A, numbered according to the EU index as in Kabat.
   484. The AAV particle of any one of embodiments 466-474 or 476-483, wherein the Fc region comprises V at position 235, L at position 243, P at position 292, L at position 300, L at position 396, A at position 253, A at position 310, and A at position 435, numbered according to the EU index as in Kabat.
   485. The AAV particle of embodiment 466 or 467, wherein
[0329] (i) the encoded Fc region comprises the amino acid sequence of SEQ ID NO: 5278, or an amino acid sequence with at least 80% (e.g., at least about 85, 90, 95, 96, 97, 98, or 99%) sequence identity thereto; and/or
[0330] (ii) the nucleotide sequence encoding the Fc region comprises the nucleotide sequence of SEQ ID NO: 5277, or a nucleotide sequence with at least 80% (e.g., at least about 85, 90, 95, 96, 97, 98, or 99%) sequence identity thereto.
   486. The AAV particle of embodiment 467, wherein the nucleotide sequence encoding the scFv comprises the nucleotide sequence of SEQ ID NO: 5352, or a nucleotide sequence with at least 90% (e.g., at least 95, 96, 97, 98, or 99%) sequence identity thereto, and the nucleotide sequence encoding the Fe region comprises the nucleotide sequence of SEQ ID NO: 5277, or a nucleotide sequence with at least 80% (e.g., at least about 85, 90, 95, 96, 97, 98, or 99%) sequence identity thereto.
   487. The AAV particle of any one of the preceding embodiments, wherein the transgene further encodes an antibody mimetic, e.g., a designed ankyrin repeat protein (DARPIN), optionally wherein the encoded DARPIN comprises the amino acid sequence of SEQ ID NO: 5370, or an amino acid sequence with at least 80% (e.g., 85, 90, 95, 96, 97, 98, or 99%) sequence identity thereto, or the nucleotide sequence encoding the DARPIN comprises the nucleotide sequence of SEQ ID NO: 5371, or a nucleotide sequence with at least 80% (e.g., 85, 90, 95, 96, 97, 98, or 99%) sequence identity thereto.
   488. The AAV particle of any one of the preceding embodiments, wherein the transgene further encodes a fynomer, optionally wherein the encoded fynomer comprises the amino acid sequence of SEQ ID NO: 5156, or an amino acid sequence with at least 80% (e.g., 85, 90, 95, 96, 97, 98, or 99%) sequence identity thereto, or the nucleotide sequence encoding the fynomer comprises the nucleotide sequence of SEQ ID NO: 5155, or a nucleotide sequence with at least 80% (e.g., 85, 90, 95, 96, 97, 98, or 99%) sequence identity thereto.
   489. The AAV particle of any one of the preceding embodiments, further encoding a signal sequence, optionally wherein the signal sequence comprises a nucleotide sequence of any of the signal sequences listed in Table 11A, or a nucleotide sequence with at least 95% sequence identity thereto.
   490. The AAV particle of embodiment 489, further encoding a second signal sequence, optionally wherein the second signal sequence comprises a nucleotide sequence of any of the signal sequences listed in Table 11A, or a nucleotide sequence with at least 95% sequence identity thereto.
   491. The AAV particle of embodiment 490 wherein:
[0331] (i) the nucleotide sequence encoding the signal sequence comprises the nucleotide sequence of SEQ ID NO: 5157, and is located 5′ relative to the nucleotide sequence encoding the VH and/or the heavy chain;
[0332] (ii) the nucleotide sequence encoding the signal sequence comprises the nucleotide sequence of SEQ ID NO: 5032, and is located 5′ relative to the nucleotide sequence encoding the VH and/or the heavy chain; and/or
[0333] (iii) the nucleotide sequence encoding the signal sequence comprises the nucleotide sequence of SEQ ID NO: 5159, and is located 5′ relative to the nucleotide sequence encoding the VL and/or the light chain.
   492. The AAV particle of any one of the preceding embodiments, wherein:
[0334] (i) the sequences of the encoded VH and VL are connected directly, e.g., without a linker;
[0335] (ii) the sequences of the encoded VH and VL are connected via a linker;
[0336] (iii) the sequences of the encoded heavy chain and light chain are connected directly. e.g., without a linker; or
[0337] (iv) the sequences of the encoded heavy chain and light chain are connected via a linker.
   493. The AAV particle of embodiment 492, wherein:
[0338] (i) the linker comprises a nucleotide sequence of any of the linker sequences listed in Table 41, or a nucleotide sequence with at least 95% sequence identity thereto;
[0339] (ii) the linker comprises an encoded furin cleavage site;
[0340] (iii) the linker comprises an encoded T2A linker; and/or
[0341] (iv) the linker comprises a glycine-serine linker, e.g., a G4S linker (SEQ ID NO: 4535) or a (G4S)3 linker (SEQ ID NO: 4537).
   494. The AAV particle embodiment 492 or 493, wherein:
[0342] (i) the linker comprises an encoded furin cleavage site and/or comprises the nucleotide sequence of SEQ ID NO: 1724 or 6557; and/or
[0343] (ii) the linker comprises an encoded T2A linker and/or the nucleotide sequence of SEQ ID NO: 1726 or 6558; and/or
[0344] (iii) the linker comprises an encoded glycine-serine linker encoded by the nucleotide sequence of SEQ ID NOs: 6597, 5161, 5162, or 5347, or the nucleotide sequence of GGCTCT.
   495. The AAV particle of any one of the preceding embodiments, wherein the transgene encodes a second antigen-binding region having a different binding specificity than the antigen-binding region that binds to HER2/neu.
   496. The AAV particle of embodiment 495, wherein the second antigen-binding region binds to a molecule selected from the group consisting of a cancer- or tumor-associated antigen; a cancer-associated integrin; a T cell and/or NK cell antigen; an angiogenic factor or other cancer-associated growth factor; receptor for an angiogenic factor; and a receptor associated with cancer progression.
   497. The AAV particle of embodiment 495 or 496, wherein the second antigen-binding region binds to carcinoembryonic antigen (CEA), prostate specific antigen (PSA), RAGE (renal antigen), α-fetoprotein, CAMEL (CTL-recognized antigen on melanoma), CT antigens (such as MAGE-B5, -B6, -C2, -C3, and D; Mage-12; CT10; NY-ESO-1, SSX-2, GAGE, BAGE, MAGE, and SAGE), mucin antigens (e.g., MUC1, mucin-CA125, etc.), ganglioside antigens, tyrosinase, gp75, c-Met, C-myc, Mart1., MelanA, MUM-1, MUM-2, MUM-3, HLA-B7, Ep-CAM or a cancer-associated integrin, such as a5133 integrin, a T cell and/or NK cell antigen, such as CD3 or CD16, an angiogenic factor or other cancer-associated growth factor, such as a vascular endothelial growth factor, a fibroblast growth factor, epidermal growth factor, and receptors associated with cancer progression.
   498. The AAV particle of embodiment 495 or 496, wherein the second antigen-binding region binds HER1, HER3, or HER4.
   499. The AAV particle of any one of embodiments 495, 496 or 498, wherein the second antigen-binding site binds a different, preferably non-blocking, site on HER2.
   500. The AAV particle of embodiment 495, wherein the first heavy chain variable region is encoded by the nucleotide sequence of SEQ ID NO: 5253, 5257 or 5261, and the second heavy chain variable is encoded by the nucleotide sequence of SEQ ID NO: 5254, 5258 or 5262.
   501. The AAV particle of any one of embodiments 495-500, wherein the first light chain variable region is encoded by the nucleotide sequence of SEQ ID NO: 5255, 5259 or 5265, and a second light chain variable region encoded by the nucleotide sequence of SEQ ID NO: 5256, 5260 or 5267.
   502. The AAV particle of any one of embodiments 422-501, wherein the encoded antibody is a multispecific antibody molecule, e.g., a bispecific antibody molecule.
   503. The AAV particle of any one of embodiments 422-502, wherein the encoded antibody is a bispecific, e.g., biparatopic, antibody molecule.
   504. The AAV particle of embodiment 503, wherein the encoded bispecific, e.g., biparatopic, antibody molecule comprises at least two antigen binding domains for two different domains of HER2.
   505. The AAV particle of embodiment 503 or 504, wherein the encoded bispecific, e.g., biparatopic, antibody molecule comprises a first antigen binding domain that binds domain IV of HER2 and a second antigen binding domain that binds domain I of HER2.
   506. The AAV particle of embodiment 503 or 504, wherein the encoded bispecific, e.g., biparatopic, antibody molecule comprises a first antigen binding domain that binds domain I of HER2 and a second antigen binding domain that binds domain IV of HER2.
   507. The AAV particle of any one of embodiments 503-506, wherein the first and/or second antigen binding domain comprise an IgG antibody, single-chain Fv (scFv), a scFv fragment, a Fab, a single-chain Fab (scFabs), a single-chain antibody, a diabody, an antibody variable domain, a VHH, a single domain antibody, and/or a nanobody.
   508. The AAV particle of any one of embodiments 503-507, wherein:
[0345] (i) the first antigen binding domain comprises an scFv, and the second antigen binding domain comprises a full antibody, e.g., an IgG antibody;
[0346] (ii) the first antigen binding domain comprises an antibody mimetic, e.g., a DARPIN, and the second antigen binding domain comprises a full antibody, e.g., an IgG antibody; or
[0347] (iii) the first antigen binding domain comprises a Fyn SH3-derived binding polypeptide (e.g., a fynomer), and the second antigen binding domain comprises a full antibody, e.g., an IgG antibody.
   509. The AAV particle of any one of embodiment 503-508, wherein:
[0348] (i) the first antigen binding domain comprises a full antibody, e.g., an IgG antibody, and the second antigen binding domain comprises an scFv;
[0349] (ii) the first antigen binding domain comprises a full antibody, e.g., an IgG antibody, and the second antigen binding domain comprises an antibody mimetic, e.g., a DARPIN; or
[0350] (iii) the first antigen binding domain comprises a full antibody, e.g., an IgG antibody, and the second antigen binding domain comprises a Fyn SH3-derived binding polypeptide (e.g., a fynomer).
   510. The AAV particle of any one of embodiments 503-508, wherein:
[0351] (i) the first antigen binding domain that binds domain IV of HER2, e.g., an scFv that binds domain IV of HER2, is situated N-terminal of the second antigen binding domain that binds domain I of HER2, e.g., a full antibody, e.g., an IgG antibody that binds domain I of HER2;
[0352] (ii) the first antigen binding domain that binds domain I of HER2, e.g., an antibody mimetic, e.g., a DARPIN, is situated N-terminal of the second antigen binding domain that binds domain IV of HER2, e.g., a full antibody, e.g., an IgG antibody that binds domain IV of HER2; or
[0353] (iii) the first antigen binding domain that binds domain I of HER2, e.g., a Fyn SH3-derived binding polypeptide (e.g., a fynomer), is situated N-terminal of the second antigen binding domain that binds domain IV of HER2, e.g., a full antibody, e.g., an IgG antibody that binds domain IV of HER2.
   511. The AAV particle of any one of embodiments, 503-510, wherein the encoded bispecific antibody molecule comprises:
[0354] (i) a first polypeptide comprising, from N-terminal to C-terminal: VH of the first binding domain, first peptide linker (e.g., a (G4S)3 linker (SEQ ID NO: 4537)), VL of first binding domain, second peptide linker (e.g., a (G4S) linker (SEQ ID NO: 4535)), VL of the second binding domain and CL; and
[0355] (ii) a second polypeptide comprising, from N-terminal to C-terminal: VH of the second binding domain, CH1, CH2, and CH3.
   512. The AAV particle of any one of embodiments, 503-510, wherein the encoded bispecific antibody molecule comprises:
[0356] (i) a first polypeptide comprising, from N-terminal to C-terminal: a DARPIN, a peptide linker (e.g., a (G4S)3 linker (SEQ ID NO: 4537)), VL of the second binding domain and CL; and
[0357] (ii) a second polypeptide comprising from N-terminal to C-terminal: VH of the second binding domain, CH1, CH2, and CH3.
   513. The AAV particle of any one of embodiments, 503-510, wherein the encoded bispecific antibody molecule comprises:
[0358] (i) a first polypeptide comprising, from N-terminal to C-terminal: a Fyn SH3-derived binding polypeptide, a peptide linker (e.g., a (G4S)3 linker (SEQ ID NO: 4537)), VL of the second binding domain and CL; and
[0359] (ii) a second polypeptide comprising from N-terminal to C-terminal: VH of the second binding domain, CH1, CH2, and CH3.
   514. The AAV particle of any one of embodiments 503-513, which comprises an Fc region, optionally wherein the Fc region, is mutated to have reduced binding to Fc receptor or reduced ADCC, e.g., an Fc region having the mutations L235V, F243L, R292P, Y300L, and P396L, numbered according to the EU index as in Kabat.
   515. The AAV particle of any one of embodiments 1-422, wherein the encoded antibody molecule is a multispecific, e.g., bispecific, antibody molecule comprising at least two antigen binding domains for two different domains of HER2, optionally wherein the first antigen binding domain binds to domain I of HER2, and the second antigen binding domain binds to domain IV of HER2.
   516. The AAV particle of embodiment 515, wherein:
[0360] (i) the first antigen binding domain binds domain I of HER2 and the second antigen binding domain that binds domain IV of HER2;
[0361] (ii) the first antigen binding domain that binds domain II of HER2 and the second antigen binding domain that binds domain IV of HER2;
[0362] (iii) the first antigen binding domain that binds domain III of HER2 and the second antigen binding domain that binds domain IV of HER2;
[0363] (iv) the first antigen binding domain that binds domain I of HER2 and the second antigen binding domain that binds domain II of HER2;
[0364] (v) the first antigen binding domain that binds domain I of HER2 and the second antigen binding domain that binds domain III of HER2; or
[0365] (vi) the first antigen binding domain that binds domain II of HER2 and the second antigen binding domain that binds domain III of HER2.
   517. The AAV particle of embodiment 515 or 516, wherein the first antigen binding domain binds domain I of HER2 and the second antigen binding domain that binds domain IV of HER2.
   518. The AAV particle of embodiment 515 or 516, wherein the first antigen binding domain binds domain IV of HER2 and the second antigen binding domain that binds domain I of HER2.
   519. The AAV particle of any one of embodiments 515-518, wherein the first antigen binding domain and/or the second antigen binding domain comprise:
[0366] (i) a heavy chain variable region comprising one, two, or three HC CDR sequence of any of the CDR sequences of Table 3A-3C; and/or
[0367] (ii) a light chain variable region comprising one, two, or three LC CDR sequence of any of the CDR sequences of Table 3A-3C.
   520. The AAV particle of any one of embodiments 515-519, wherein the first antigen binding domain and/or the second antigen binding domain comprise:
[0368] (i) a heavy chain variable region (VH) comprising an amino acid sequence of any of the VH sequences of Table 3A-3C, or a sequence having at least 80% (e.g., 85, 90, 95, 96, 97, 98, or 99%) sequence identity to any of the VH sequences of Table 3A-3C; and/or
[0369] (ii) a light chain variable region (VL) comprising an amino acid sequence of any of the VL sequences of Table 3A-3C, or a sequence having at least 80% (e.g., 85, 90, 95, 96, 97, 98, or 99%) sequence identity to any of the VL sequences of Table 3A-3C.
   521. The AAV particle of any one of embodiments 515-519, wherein the first antigen binding domain and/or the second antigen binding domain comprise:
[0370] (i) a heavy chain constant region comprising an amino acid sequence of any of the heavy chain constant region sequences of Table 3A-3C, or a sequence having at least 80% (e.g., 85, 90, 95, 96, 97, 98, or 99%) sequence identity to the heavy chain constant region sequences of Table 3A-3C; and/or
[0371] (ii) a light chain constant region (CL) comprising an amino acid sequence of any of the CL sequences of Table 3A-3C, or a sequence having at least 80% (e.g., 85, 90, 95, 96, 97, 98, or 99%) sequence identity to any of the CL sequences of Table 3A-3C.
   522. The AAV particle of any one of embodiments 515-521, wherein the first antigen binding domain and/or the second antigen binding domain comprise:
[0372] (i) a heavy chain comprising an amino acid sequence of any of the heavy chain sequences of Table 3A-3C, or a sequence having at least 80% (e.g., 85, 90, 95, 96, 97, 98, or 99%) sequence identity to any of the heavy chain sequences of Table 3A-3C; and/or
[0373] (ii) a light chain comprising an amino acid sequence of any of the light chain sequences of Table 3A-3C, or a sequence having at least 80% (e.g., 85, 90, 95, 96, 97, 98, or 99%) sequence identity to any of the light chain sequences of Table 3A-3C.
   523. The AAV particle of any one of embodiments 515-522, wherein the first antigen binding domain and/or the second antigen binding domain comprises a heavy chain variable region or a heavy chain comprising at least 1-4, e.g., at least one, two, three, or four, modifications, e.g., substitutions, in a HC CDR3 region, e.g., an HC CDR3 according to SEQ ID NO: 5001. 524. The AAV particle of any one of embodiments 515-523, wherein the first antigen binding domain and/or the second antigen binding domain comprises a heavy chain variable region or a heavy chain comprising:
[0374] (i) an amino acid substitution at one, two, three, or all of positions 102 (e.g., D102W), 107 (e.g., M107F), 108 (e.g., D108A), and/or 109 (e.g., Y109L), numbered according to the amino acid sequence of SEQ ID NO: 5001;
[0375] (ii) one, two, three, or all of an amino acid other than D at position 102, an amino acid other than M at position 107, an amino acid other than D at position 108, and/or an amino acid other than Y at position 109, numbered according to the amino acid sequence of SEQ ID NO: 5001; or
[0376] (iii) one, two, three or all of the amino acid W at position 102, the amino acid F at position 107, A at position 108, and/or L at position 109, numbered according to the amino acid sequence of SEQ ID NO: 5001.
   525. The AAV particle of any one of embodiments 515-524, wherein the first antigen binding domain and/or the second antigen binding domain comprises a heavy chain variable region or a heavy chain comprising:
[0377] (a) the amino acid W at position 102, the amino acid F at position 107, the amino acid A position 108, and the amino acid L at position 109, relative to a reference sequence numbered according to the amino acid sequence of SEQ ID NO: 5001;
[0378] (b) the amino acid W at position 102, the amino acid F at position 107, and the amino acid A position 108, relative to a reference sequence numbered according to the amino acid sequence of SEQ ID NO: 5001;
[0379] (c) the amino acid W at position 102, the amino acid F at position 107, and the amino acid L at position 109, relative to a reference sequence numbered according to the amino acid sequence of SEQ ID NO: 5001;
[0380] (d) the amino acid W at position 102, the amino acid A position 108, and the amino acid L at position 109, relative to a reference sequence numbered according to the amino acid sequence of SEQ ID NO: 5001;
[0381] (e) the amino acid F at position 107, the amino acid A position 108, and the amino acid L at position 109, relative to a reference sequence numbered according to the amino acid sequence of SEQ ID NO: 5001.
   526. The AAV particle of any one of embodiments 515-525, wherein the first antigen binding domain and/or the second antigen binding domain comprises a heavy chain variable region or a heavy chain comprising:
[0382] (i) the amino acid substitutions D98W, M100F, D101A, and Y102L, numbered according to Kabat;
[0383] (ii) the amino acid substitutions D98W, M100F, and D101A, numbered according to Kabat;
[0384] (iii) the amino acid substitutions D98W, M100F, and Y102L, numbered according to Kabat;
[0385] (iv) the amino acid substitutions D98W, D101A, and Y102L, numbered according to Kabat;
[0386] (v) the amino acid substitutions M100F, D101A, and Y102L, numbered according to Kabat.
   527. The AAV particle of any one of embodiments 515-526, wherein the first antigen binding domain and/or the second antigen binding domain comprises a heavy chain variable region or a heavy chain comprising an HC CDR1, a HC CDR2, a HC CDR3, wherein:
[0387] (i) the HC CDR1, HC CDR2, HC CDR3 comprise the sequences of SEQ ID NO: 5281, 5282, 6510, respectively;
[0388] (ii) the HC CDR1, HC CDR2, HC CDR3 comprise the sequences of SEQ ID NO: 5281, 5282, 6515, respectively;
[0389] (iii) the HC CDR1, HC CDR2, HC CDR3 comprise the sequences of SEQ ID NO: 5281, 5282, 6520, respectively;
[0390] (iv) the HC CDR1, HC CDR2, HC CDR3 comprise the sequences of SEQ ID NO: 5281, 5282, 6525, respectively; or
[0391] (v) the HC CDR1, HC CDR2, HC CDR3 comprise the sequences of SEQ ID NO: 5281, 5282, 6530, respectively.
   528. The AAV particle of any one of embodiments 515-527, wherein the first antigen binding domain and/or the second antigen binding domain comprises:
[0392] (i) a heavy chain variable region comprising a HC CDR1 amino acid sequence of SEQ ID NO: 5281, a HC CDR2 amino acid sequence of SEQ ID NO: 5282, and an HC CDR3 amino acid sequence of SEQ ID NO: 5283, 6510, 6515, 6520, 6525 or 6530; and
[0393] (ii) a light chain variable region comprising an LC CDR1 amino acid sequence of SEQ ID NO: 5287, an LC CDR2 amino acid sequence of SEQ ID NO: 5288, and an LC CDR3 amino acid sequence of SEQ ID NO: 5289.
   529. The AAV particle of any one of embodiments 515-528, wherein the first antigen binding domain and/or the second antigen binding domain comprises an HC CDR1, a HC CDR2, a HC CDR3, a LC CDR1, a LC CDR2 and/or an LC CDR3, wherein:
[0394] (i) the HC CDR1, HC CDR2, HC CDR3, LC CDR1, LC CDR2, and LC CDR3 sequences comprise the sequences of SEQ ID NO: 5281, 5282, 6510, 5287, 5288, and 5289, respectively;
[0395] (ii) the HC CDR1, HC CDR2, HC CDR3, LC CDR1, LC CDR2, and LC CDR3 sequences comprise the sequences of SEQ ID NO: 5281, 5282, 6515, 5287, 5288, and 5289, respectively;
[0396] (iii) the HC CDR1, HC CDR2, HC CDR3, LC CDR1, LC CDR2, and LC CDR3 sequences comprise the sequences of SEQ ID NO: 5281, 5282, 6520, 5287, 5288, and 5289, respectively;
[0397] (iv) the HC CDR1, HC CDR2, HC CDR3, LC CDR1, LC CDR2, and LC CDR3 sequences comprise the sequences of SEQ ID NO: 5281, 5282, 6525, 5287, 5288, and 5289, respectively;
[0398] (v) the HC CDR1, HC CDR2, HC CDR3, LC CDR1, LC CDR2, and LC CDR3 sequences comprise the sequences of SEQ ID NO: 5281, 5282, 6530, 5287, 5288, and 5289, respectively.
   530. The AAV particle of any one of embodiments 515-529, wherein the first antigen binding domain comprises:
[0399] (i) a heavy chain variable region comprising a HC CDR1 amino acid sequence of SEQ ID NO: 5358, a HC CDR2 amino acid sequence of SEQ ID NO: 5359, and an HC CDR3 amino acid sequence of SEQ ID NO: 5360, 6535, 6538, 6541, 6544, or 6547; and
[0400] (ii) a light chain variable region comprising an LC CDR1 amino acid sequence of SEQ ID NO: 5355, an LC CDR2 amino acid sequence of SEQ ID NO: 5356, and an LC CDR3 amino acid sequence of SEQ ID NO: 5357.
   531. The AAV particle of any one of embodiments 515-530, wherein the second antigen binding domain comprises:
[0401] (i) a HC CDR1 amino acid sequence of SEQ ID NO: 5361, a HC CDR2 amino acid sequence of SEQ ID NO: 5362, and an HC CDR3 amino acid sequence of SEQ ID NO: 5363; and
[0402] (ii) a light chain variable region comprising an LC CDR1 amino acid sequence of SEQ ID NO: 5317, an LC CDR2 amino acid sequence of SEQ ID NO: 5318, and an LC CDR3 amino acid sequence of SEQ ID NO: 5319.
   532. The AAV particle of any one of one of embodiments 515-531, wherein the first antigen binding domain and/or the second antigen binding domain comprises a heavy chain variable region comprising an amino acid selected from SEQ ID NO: 5001, 5367, 5172, 5106, 5010, 5069, 5192, 5224, 5090, 5110, 5254, 5258, 5130, 5262, 5270, 5326, 6511, 6516, 6521, 6526, 6531, 6536, 6539, 6542, 6545, or 6548, or a sequence substantially identical (e.g., having at least about 80%, 85%, 90%, 92%, 95%, 97%, 98%, or 99% sequence identity) to any of the aforesaid sequences.
   533. The AAV particle of any one of embodiments 515-532, wherein the encoded multispecific antibody comprises:
[0403] (i) a first anti-HER2 VH comprising the amino acid sequence of SEQ ID NO: 5262, and a heavy chain constant region comprising the amino acid sequence of SEQ ID NO: 5220; and
[0404] (ii) a second chain, which comprises from the N-terminus to the C-terminus, a second anti-HER2 VH comprising the amino sequence of SEQ ID NO: 5290, 6536, 6539, 6542, 6545, or 6548, a (G4S)3 linker (SEQ ID NO: 4537), a first anti-HER2 VL comprising the amino acid sequence of SEQ ID NO: 5266, a (GS) linker, a second anti-HER2 VL comprising the amino acid sequence of SEQ ID NO: 5354, and a light chain constant region (CL) comprising the amino acid sequence of SEQ ID NO: 5218;
[0405] or a sequence substantially identical (e.g., having at least 70%, 75%, 80%, 85%, 90%, 95%, or 99% sequence identity) to the any of the aforesaid sequences.
   534. The AAV particle of any one of embodiments 515-533, wherein the encoded antibody molecule comprises an Fc region.
   535. The AAV particle of embodiment 534, wherein the Fc receptor comprises:
[0406] (i) a mutation at one or more of (e.g., all of) positions I253 (e.g., I253A), H310 (e.g., H310A or H310Q), and/or H435 (e.g., H435A or H435Q), numbered according to the EU index as in Kabat; and/or
[0407] (ii) a mutation at one or more of (e.g., all of) positions L235 (e.g., L235V), F243 (e.g., F243L), R292 (e.g., R292P), Y300 (e.g., Y300L), and P396 (e.g., P396L), numbered according to the EU index as in Kabat.
   536. The AAV particle of any one of embodiments 515-535, wherein the first and/or second antigen binding domain comprise an IgG antibody, single-chain Fv (scFv), a scFv fragment, a Fab, a single-chain Fab (scFabs), a single-chain antibody, a diabody, an antibody variable domain, a VHH, a single domain antibody, and/or a nanobody.
   537. The AAV particle of any one of embodiments 515-536, wherein:
[0408] (i) the first antigen binding domain comprises an scFv, and the second antigen binding domain comprises a full antibody, e.g., an IgG antibody;
[0409] (ii) the first antigen binding domain comprises an antibody mimetic, e.g., a DARPIN, and the second antigen binding domain comprises a full antibody, e.g., an IgG antibody; or
[0410] (iii) the first antigen binding domain comprises a Fyn SH3-derived binding polypeptide (e.g., a fynomer), and the second antigen binding domain comprises a full antibody, e.g., an IgG antibody

[0411] 538. The AAV particle of any one of embodiments 515-536, wherein:
[0412] (i) the first antigen binding domain comprises a full antibody, e.g., an IgG antibody, and the second antigen binding domain comprises an scFv;
[0413] (ii) the first antigen binding domain comprises a full antibody, e.g., an IgG antibody, and the second antigen binding domain comprises an antibody mimetic, e.g., a DARPIN; or
[0414] (iii) the first antigen binding domain comprises a full antibody, e.g., an IgG antibody, and the second antigen binding domain comprises a Fyn SH3-derived binding polypeptide (e.g., a fynomer).
   539. The AAV particle of any one of embodiments 515-538, wherein:
[0415] (i) the first antigen binding domain that binds domain IV of HER2, e.g., an scFv that binds domain IV of HER2, is situated N-terminal of the second antigen binding domain that binds domain I of HER2, e.g., a full antibody, e.g., an IgG antibody that binds domain I of HER2;
[0416] (ii) the first antigen binding domain that binds domain I of HER2. e.g., an antibody mimetic, e.g., a DARPIN, is situated N-terminal of the second antigen binding domain that binds domain IV of HER2, e.g., a full antibody, e.g., an IgG antibody that binds domain IV of HER2; or
[0417] (iii) the first antigen binding domain that binds domain I of HER2, e.g., a Fyn SH3-derived binding polypeptide (e.g., a fynomer), is situated N-terminal of the second antigen binding domain that binds domain IV of HER2, e.g., a full antibody, e.g., an IgG antibody that binds domain IV of HER2.
   540. The AAV particle of any one of embodiments 515-539, wherein the encoded bispecific antibody molecule comprises:
[0418] (i) a first polypeptide comprising, from N-terminal to C-terminal: VH of the first binding domain, first peptide linker (e.g., a (G4S)3 linker (SEQ ID NO: 4537)), VL of first binding domain, second peptide linker (e.g., a (G4S) linker (SEQ ID NO: 4535)), VL of the second binding domain and CL; and
[0419] (ii) a second polypeptide comprising, from N-terminal to C-terminal: VH of the second binding domain, CH1, CH2, and CH3.
   541. The AAV particle of any one of embodiments 515-539, wherein the encoded bispecific antibody molecule comprises:
[0420] (i) a first polypeptide comprising, from N-terminal to C-terminal: a DARPIN, a peptide linker (e.g., a (G4S)3 linker (SEQ ID NO: 4537)), VL of the second binding domain and CL; and
[0421] (ii) a second polypeptide comprising from N-terminal to C-terminal: VH of the second binding domain, CH1, CH2, and CH3.
   542. The AAV particle of any one of embodiments 515-539, wherein the encoded bispecific antibody molecule comprises:
[0422] (i) a first polypeptide comprising, from N-terminal to C-terminal: a Fyn SH3-derived binding polypeptide, a peptide linker (e.g., a (G4S)3 linker (SEQ ID NO: 4537)), VL of the second binding domain and CL; and
[0423] (ii) a second polypeptide comprising from N-terminal to C-terminal: VH of the second binding domain, CH1, CH2, and CH3.
   543. The AAV particle of any one of embodiments 515-539, the encoded bispecific antibody molecule comprises:
[0424] (i) a first chain, which comprises, from the N-terminus to the C-terminus, a first anti-HER2 VH comprising the amino acid sequence of SEQ ID NO: 5262, and a heavy chain constant region comprising the amino acid sequence of SEQ ID NO: 5216; and a second chain, which comprises from the N-terminus to the C-terminus, a second anti-HER2 VH comprising the amino sequence of 5290, a (G4S)3 linker (SEQ ID NO: 4537), a first anti-HER2 VL comprising the amino acid sequence of SEQ ID NO: 5266, a (GS) linker, a second anti-HER2 VL comprising the amino acid sequence of SEQ ID NO: 5354, and a light chain constant region (CL) comprising the amino acid sequence of SEQ ID NO: 5218; or a sequence substantially identical (e.g., having at least 70%, 75%, 80%, 85%, 90%, 95%, or 99% sequence identity) to the any of the aforesaid sequences;
[0425] (ii) a first chain comprising a heavy chain comprising the amino acid sequence of SEQ ID NO: 5264; and a second chain comprising an scFv comprising the amino acid sequence of SEQ ID NO: 5351, fused to a light chain comprising the amino acid sequence of SEQ ID NO: 5268; or a sequence substantially identical (e.g., having at least 70%, 75%, 80%, 85%, 90%, 95%, or 99% sequence identity) to the any of the aforesaid sequences; and/or
[0426] (iii) a first chain comprising the amino acid sequence of SEQ ID NO: 5264, or an amino acid sequence substantially identical (e.g., having at least 70%, 75%, 80%, 85%, 90%, 95%, or 99% sequence identity) thereto; and/or a second chain comprising the amino acid sequence of SEQ ID NO: 5365, or an amino acid sequence substantially identical (e.g., having at least 70%, 75%, 80%, 85%, 90%, 95%, or 99% sequence identity) thereto.
   544. The AAV particle of any one of embodiments 515-539 the encoded bispecific antibody molecule comprises:
[0427] (i) a first chain, which comprises, from the N-terminus to the C-terminus, a first anti-HER2 VH comprising the amino acid sequence of SEQ ID NO: 5262, and a heavy chain constant region comprising the amino acid sequence of SEQ ID NO: 5220; and a second chain, which comprises from the N-terminus to the C-terminus, a second anti-HER2 VH comprising the amino sequence of 5290, a (G4S)3 linker (SEQ ID NO: 4537), a first anti-HER2 VL comprising the amino acid sequence of SEQ ID NO: 5266, a (GS) linker, a second anti-HER2 VL comprising the amino acid sequence of SEQ ID NO: 5354, and a light chain constant region (CL) comprising the amino acid sequence of SEQ ID NO: 5218; or a sequence substantially identical (e.g., having at least 70%, 75%, 80%, 85%, 90%, 95%, or 99% sequence identity) to the any of the aforesaid sequences;
[0428] (ii) a first chain comprising a heavy chain comprising the amino acid sequence of SEQ ID NO: 5376; and a second chain comprising an scFv comprising the amino acid sequence of SEQ ID NO: 5351, fused to a light chain comprising the amino acid sequence of SEQ ID NO: 5268; or a sequence substantially identical (e.g., having at least 70%, 75%, 80%, 85%, 90%, 95%, or 99% sequence identity) to the any of the aforesaid sequences; and/or
[0429] (iii) a first chain comprising the amino acid sequence of SEQ ID NO: 5376, or an amino acid sequence substantially identical (e.g., having at least 70%, 75%, 80%, 85%, 90%, 95%, or 99% sequence identity) thereto; and/or a second chain comprising the amino acid sequence of SEQ ID NO: 5365, or an amino acid sequence substantially identical (e.g., having at least 70%, 75%, 80%, 85%, 90%, 95%, or 99% sequence identity) thereto.
   545. The AAV particle of any one of embodiments 515-539, the encoded bispecific antibody molecule comprises:
[0430] (i) a first chain, comprising from the N-terminus to the C-terminus, an anti-HER2 VH comprising the amino sequence comprising the amino acid sequence of SEQ ID NO: 5001, and a heavy chain constant region comprising the amino acid sequence of SEQ ID NO: 5018; and a second chain, comprising from the N-terminus to the C-terminus, a DARPIN molecule comprising the amino acid sequence of SEQ ID NO: 5370, a (G4S)3 linker (SEQ ID NO: 4537), an anti-HER2 VL comprising the amino acid sequence of SEQ ID NO: 5006, and a light chain constant region (CL) comprising the amino acid sequence of SEQ ID NO: 5008; or a sequence substantially identical (e.g., having at least 70%, 75%, 80%, 85%, 90%, 95%, or 99% sequence identity) to the any of the aforesaid sequences;
[0431] (ii) a first chain comprising the amino acid sequence of SEQ ID NO: 5368; and a second chain comprising the amino acid sequence of SEQ ID NO: 5370, a (G4S)3 linker (SEQ ID NO: 4537), and the amino acid sequence comprising of SEQ ID NO: 5063; or a sequence substantially identical (e.g., having at least 70%, 75%, 80%, 85%, 90%, 95%, or 99% sequence identity) to the any of the aforesaid sequences; and/or
[0432] (iii) a first chain comprising the amino acid sequence of SEQ ID NO: 5368, and a second chain comprising the amino acid sequence of SEQ ID NO: 5372; or a sequence substantially identical (e.g., having at least 70%, 75%, 80%, 85%, 90%, 95%, or 99% sequence identity) to the any of the aforesaid sequences.
   546. The AAV particle of any one of embodiments 515-539, the encoded bispecific antibody molecule comprises:
[0433] (i) a first chain, comprising from the N-terminus to the C-terminus, an anti-HER2 VH comprising the amino sequence comprising the amino acid sequence of SEQ ID NO: 5010, and a heavy chain constant region comprising the amino acid sequence of SEQ ID NO: 5012; and a second chain, comprising from the N-terminus to the C-terminus, a C12 fynomer comprising the amino acid sequence of SEQ ID NO: 5156, a (G4S)3 linker (SEQ ID NO: 4537), an anti-HER2 VL comprising the amino acid sequence of SEQ ID NO: 5014, and a light chain constant region (CL) comprising the amino acid sequence of SEQ ID NO: 5008; or a sequence substantially identical (e.g., having at least 70%, 75%, 80%, 85%, 90%, 95%, or 99% sequence identity) to the any of the aforesaid sequences; and/or
[0434] (ii) a first chain comprising the amino acid sequence of SEQ ID NO: 5066; and a second chain comprising the amino acid sequence of SEQ ID NO: 5156, a (G4S)3 linker (SEQ ID NO: 4537), and the amino acid sequence comprising of SEQ ID NO: 5068; or a sequence substantially identical (e.g., having at least 70%, 75%, 80%, 85%, 90%, 95%, or 99% sequence identity) to the any of the aforesaid sequences.
   547. The AAV particle of any one of embodiments 422-546, further comprising a genetic element comprising a promoter operably linked to the transgene.
   548. The AAV particle of embodiment 547, wherein:
[0435] (i) the promoter is chosen from human elongation factor 1α-subunit (EF1α), cytomegalovirus (CMV) immediate-early enhancer and/or promoter, chicken β-actin (CBA) and its derivative CAG, β glucuronidase (GUSB), or ubiquitin C (UBC), neuron-specific enolase (NSE), platelet-derived growth factor (PDGF), platelet-derived growth factor B-chain (PDGF-β), intercellular adhesion molecule 2 (ICAM-2), synapsin (Syn), methyl-CpG binding protein 2 (MeCP2), Ca2+/calmodulin-dependent protein kinase II (CaMKII), metabotropic glutamate receptor 2 (mGluR2), neurofilament light (NFL) or heavy (NFH), β-globin minigene nβ2, preproenkephalin (PPE), enkephalin (Enk) and excitatory amino acid transporter 2 (EAAT2), glial fibrillary acidic protein (GFAP), myelin basic protein (MBP), or a fragment, e.g., a truncation, or a functional variant thereof; and/or
[0436] (ii) the promoter comprises a nucleotide sequence chosen from any one of SEQ ID NOs: 6563-6572, 6593-6594, or 4599, or a nucleotide sequence with at least 95% sequence identity thereto.
   549. The AAV particle of embodiment 548, wherein:
[0437] (i) the promoter is selected from a CAG promoter, a CBA promoter (e.g., a minimal CBA promoter), a CB promoter, a CMV(IE) promoter and/or enhancer, a GFAP promoter, a synapsin promoter, an ICAM2 promoter, or a functional variant thereof; and/or
[0438] (ii) the promoter comprises a nucleotide sequence selected from any one of SEQ ID NOs: 6565, 6566, 6568, 6569, 4599, 6594, or a nucleotide sequence with at least 95% sequence identity thereto.
   550. The AAV particle of embodiment 547, wherein the promoter is a ubiquitous promoter.
   551. The AAV particle of embodiment 550, wherein the ubiquitous promoter is selected from CMV, CBA (including derivatives CAG, CB6, CBh, etc.), EF-1α, PGK, UBC, GUSB (hGBp), or UCOE (promoter of HNRPA2B1-CBX3).
   552. The AAV particle of embodiment 547, wherein the promoter is a tissue specific promoter, e.g., a GFAP promoter or a synapsin promoter.
   553. The AAV particle of any one of embodiments 547-550, wherein the promoter:
[0439] (i) is a CB promoter; and/or
[0440] (ii) comprises the nucleotide sequence of SEQ ID NO: 6566 or a nucleotide sequence with at least 95% sequence identity thereto.
   554. The AAV particle of any one of embodiments 547-550, wherein the promoter:
[0441] (i) is a CMV(IE) promoter; and/or
[0442] (ii) comprises the nucleotide sequence of SEQ ID NO: 6594, or a nucleotide sequence with at least 95% sequence identity thereto.
   555. The AAV particle of any one of embodiments 547, 548, or 552, wherein the promoter:
[0443] (i) is a GFAP promoter; and/or
[0444] (ii) comprises the nucleotide sequence of SEQ ID NO: 6568, or a nucleotide sequence with at least 95% sequence identity thereto.
   556. The AAV particle of any one of embodiments 547-555, wherein the genetic element further comprises a CMV immediate-early (CMVie) enhancer, optionally wherein the CMVie enhancer comprises the nucleotide sequence of SEQ ID NO: 6564, or a nucleotide sequence with at least 95% sequence identity to SEQ ID NO: 6564.
   557. The AAV particle of any one of embodiments 547-556, wherein the genetic element further comprises a polyadenylation (polyA) signal region, optionally wherein the polyA signal region comprises a rabbit globin polyA signal region.
   558. The AAV particle of embodiment 557, wherein the polyA signal region comprises:
[0445] (i) the nucleotide sequence of any of SEQ ID NOs: 6590-6592, or a nucleotide sequence with at least 95% sequence identity to any of SEQ ID NOs: 6590-6592; or
[0446] (ii) the nucleotide sequence of SEQ ID NO: 6590, or a nucleotide sequence with at least 95% sequence identity thereto.
   559. The AAV particle of any one of embodiments 547-558, wherein the genetic element further comprises an inverted terminal repeat (ITR) sequence, optionally wherein the ITR sequence is positioned 5′ relative to the encoded transgene and/or ITR sequence is positioned 3′ relative to the encoded transgene.
   560. The AAV particle of any one of embodiments 559, wherein the ITR sequence comprises a nucleotide sequence of any one of SEQ ID NOs: 6559-6562, or a nucleotide sequence with at least 95% sequence identity thereto.
   561. The AAV particle of embodiment 559 or 560, wherein:
[0447] (i) the ITR sequence positioned 5′ relative to the encoded transgene comprises the nucleotide sequence of SEQ ID NO: 6559, or a nucleotide sequence with at least 95% sequence identity thereto; and/or
[0448] (ii) the ITR sequence positioned 3′ relative to the encoded transgene comprises the nucleotide sequence of SEQ ID NO: 6561, or a nucleotide sequence with at least 95% sequence identity thereto.
   562. The AAV particle of any one of embodiments 547-561, wherein the genetic element further comprises an intron region, optionally wherein the intron region comprises a nucleotide sequence of any one of SEQ ID NOs: 6578-6588, 6595, 6607, 6608, or 6609, or a nucleotide sequence with at least 95% identity thereto.
   563. The AAV particle of embodiment 562, wherein the intron region comprises a human beta-globin intron region, optionally wherein the human beta-globin intron region comprises the nucleotide sequence of SEQ ID NO: 6580 or 6595, or a nucleotide sequence with at least 95% sequence identity thereto.
   564. The AAV particle of embodiment 562, wherein the intron region comprises an ie intron 1 region, optionally wherein the ie intron 1 region comprises the nucleotide sequence of SEQ ID NO: 6578, or a nucleotide sequence with at least 95% sequence identity thereto.
   565. The AAV particle of any one of embodiments 547-564, wherein the genetic element comprises at least 2 intron regions.
   566. The AAV particle of any one of embodiments 547-565, wherein the genetic element comprises:
[0449] (i) an intron region comprising the nucleotide sequence of SEQ ID NO: 6578 and SEQ ID NO: 6580;
[0450] (ii) an intron region comprising the nucleotide sequence of SEQ ID NO: 6578 and 6595;
[0451] (iii) an ie intron 1 region and a human beta-globin intron region;
[0452] (iv) an intron region comprising the nucleotide sequence of SEQ ID NO: 6580 and 6595; or
[0453] (v) an intron region comprising the nucleotide sequence of 6595.
   567. The AAV particle of any one of embodiments 547-566, wherein the genetic element further comprises an exon region, optionally wherein the exon region comprises a nucleotide sequence of any of SEQ ID NOs: 6573-6577, or a sequence with at least 95% sequence identity thereto.
   568. The AAV particle of embodiment 567, wherein the exon region comprises an ie exon 1 region, optionally wherein the ie exon 1 region comprises the nucleotide sequence of SEQ ID NO: 6573, or a nucleotide sequence with at least 95% sequence identity thereto.
   569. The AAV particle of any one of embodiments 547-568, wherein the genetic element further comprises a Kozak sequence, optionally wherein the Kozak sequence comprises:
[0454] (i) the nucleotide sequence of GCCGCCACCATG (SEQ ID NO: 6589) or GAGGAGCCACC (SEQ ID NO: 4543); or
[0455] (ii) the nucleotide sequence of GCCGCCACCATG (SEQ ID NO: 6589).
   570. The AAV particle of any one of embodiments 547-569, wherein the genetic element further comprises a nucleotide sequence encoding a miR binding site, e.g., a miR binding site that modulates, e.g., reduces, expression of the antibody molecule encoded by the genetic element in a cell or tissue where the corresponding miRNA is expressed.
   571. The AAV particle of embodiment 570, wherein the encoded miRNA binding site is complementary, e.g., fully complementary or partially complementary, to a miRNA expressed in a cell or tissue of the DRG, liver, heart, hematopoietic, or a combination thereof.
   572. The AAV particle of embodiment 570 or 571, wherein the encoded miR binding site modulates, e.g., reduces, expression of the encoded antibody molecule in a cell or tissue of the DRG, liver, heart, hematopoietic lineage, or a combination thereof.
   573. The AAV particle of any one of embodiments 547-572, wherein the genetic element comprises at least 1-5 copies of the encoded miR binding site, e.g., at least 1, 2, 3, 4, or 5 copies.
   574. The AAV particle of any one of embodiments 547-573, wherein the genetic element comprises at least 3 copies of an encoded miR binding sites, optionally wherein all three copies comprise the same miR binding site, or at least one, two, three, or all of the copies comprise a different miR binding site.
   575. The AAV particle of embodiment 574, wherein the 3 copies of the encoded miR binding sites are continuous (e.g., not separated by a spacer), or are separated by a spacer, optionally wherein the spacer comprises the nucleotide sequence of GATAGTTA, or a nucleotide sequence having at least one, two, or three modifications, but no more than four modifications of GATAGTTA.
   576. The AAV particle of any one of embodiments 547-573, wherein the genetic element comprises at least 4 copies of an encoded miR binding site, optionally wherein all four copies comprise the same miR binding site, or at least one, two, three, or all of the copies comprise a different miR binding site, optionally wherein the 4 copies of the encoded miR binding sites are continuous (e.g., not separated by a spacer), or are separated by a spacer, and further optionally wherein the spacer comprises the nucleotide sequence of GATAGTTA, or a nucleotide sequence having at least one, two, or three modifications, but no more than four modifications of GATAGTTA.
   577. The AAV particle of any one of embodiments 570-576, wherein the encoded miR binding site comprises a miR122 binding site, a miR183 binding site, a miR-142-3p binding site, a mir-1 binding site, or a combination thereof, optionally wherein:
[0456] (i) the encoded miR122 binding site comprises the nucleotide sequence of SEQ ID NO: 4673, or a nucleotide sequence substantially identical (e.g., having at least 70%, 75%, 80%, 85%, 90%, 92%, 95%, 97%, 98%, or 99% sequence identity) thereto; or a nucleotide sequence having at least one, two, three, four, five, six, or seven modifications, but no more than ten modifications of SEQ ID NO: 4673;
[0457] (ii) the encoded miR183 binding site comprises the nucleotide sequence of SEQ ID NO: 4676, or a nucleotide sequence substantially identical (e.g., having at least 70%, 75%, 80%, 85%, 90%, 92%, 95%, 97%, 98%, or 99% sequence identity) thereto; or a nucleotide sequence having at least one, two, three, four, five, six, or seven modifications, but no more than ten modifications of SEQ ID NO: 4676; (iii) the encoded miR-142-3p binding site comprises the nucleotide sequence of SEQ ID NO: 4675, or a nucleotide sequence substantially identical (e.g., having at least 70%, 75%, 80%, 85%, 90%, 92%, 95%, 97%, 98%, or 99% sequence identity) thereto; or a nucleotide sequence having at least one, two, three, four, five, six, or seven modifications, but no more than ten modifications of SEQ ID NO: 4675; and/or
[0458] (iv) the encoded miR-1 binding site comprises the nucleotide sequence of SEQ ID NO: 4679, or a nucleotide sequence substantially identical (e.g., having at least 70%, 75%, 80%, 85%, 90%, 92%, 95%, 97%, 98%, or 99% sequence identity) thereto; or a nucleotide sequence having at least one, two, three, four, five, six, or seven modifications, e.g., substitutions (e.g., conservative substitutions), but no more than ten modifications, e.g., substitutions (e.g., conservative substitutions), relative to SEQ ID NO: 4679.
   578. The AAV particle of any one of embodiments 547-577, wherein the genetic element comprises:
[0459] (i) an encoded miR122 binding site;
[0460] (ii) an encoded mir122 binding site, an encoded mir-1 binding site, and/or an encoded mir-183 binding site.
   579. The AAV particle of any one of embodiments 547-578, wherein the genetic element comprises at least 1-5 copies, e.g., 1, 2, or 3 copies of a miR122 binding site, a mir-1 binding site, or a combination thereof, optionally wherein each copy is continuous (e.g., not separated by a spacer), or each copy is separated by a spacer, optionally wherein the spacer comprises the nucleotide sequence of GATAGTTA, or a nucleotide sequence having at least one, two, or three modifications, but no more than four modifications of GATAGTTA.
   580. The AAV particle of embodiment 578 or 579, wherein:
[0461] (i) the encoded miR122 binding site comprises the nucleotide sequence of SEQ ID NO: 4673, or a nucleotide sequence substantially identical (e.g., having at least 70%, 75%, 80%, 85%, 90%, 92%, 95%, 97%, 98%, or 99% sequence identity) thereto; or a nucleotide sequence having at least one, two, three, four, five, six, or seven modifications, but no more than ten modifications of SEQ ID NO: 4673; and/or
[0462] (ii) the encoded miR-1 binding site comprises the nucleotide sequence of SEQ ID NO: 4679, or a nucleotide sequence substantially identical (e.g., having at least 70%, 75%, 80%, 85%, 90%, 92%, 95%, 97%, 98%, or 99% sequence identity) thereto; or a nucleotide sequence having at least one, two, three, four, five, six, or seven modifications, but no more than ten modifications of SEQ ID NO: 4679.
   581. The AAV particle of any one of embodiments 547-580, wherein the genetic element comprises:
[0463] (A) (i) a first encoded miR122 binding site comprising the nucleotide sequence of SEQ ID NO: 4673, or a nucleotide sequence substantially identical (e.g., having at least 70%, 75%, 80%, 85%, 90%, 92%, 95%, 97%, 98%, or 99% sequence identity) thereto; or a nucleotide sequence having at least one, two, three, four, five, six, or seven modifications, but no more than ten modifications of SEQ ID NO: 4673;
   [0464] (ii) a first spacer comprising the nucleotide sequence of GATAGTTA, or a nucleotide sequence having at least one, two, or three modifications, but no more than four modifications of GATAGTTA; and
   [0465] (iii) a second encoded miR122 binding site comprising the nucleotide sequence of SEQ ID NO: 4673, or a nucleotide sequence substantially identical (e.g., having at least 70%, 75%, 80%, 85%, 90%, 92%, 95%, 97%, 98%, or 99% sequence identity) thereto; or a nucleotide sequence having at least one, two, three, four, five, six, or seven modifications, but no more than ten modifications of SEQ ID NO: 4673; or
[0466] (B) (i) a first encoded miR122 binding site comprising the nucleotide sequence of SEQ ID NO: 4673, or a nucleotide sequence substantially identical (e.g., having at least 70%, 75%, 80%, 85%, 90%, 92%, 95%, 97%, 98%, or 99% sequence identity) thereto; or a nucleotide sequence having at least one, two, three, four, five, six, or seven modifications, but no more than ten modifications of SEQ ID NO: 4673;
   [0467] (ii) a first spacer comprising the nucleotide sequence of GATAGTTA, or a nucleotide sequence having at least one, two, or three modifications, but no more than four modifications of GATAGTTA;
   [0468] (iii) a second encoded miR122 binding site comprising the nucleotide sequence of SEQ ID NO: 4673, or a nucleotide sequence substantially identical (e.g., having at least 70%, 75%, 80%, 85%, 90%, 92%, 95%, 97%, 98%, or 99% sequence identity) thereto; or a nucleotide sequence having at least one, two, three, four, five, six, or seven modifications, but no more than ten modifications of SEQ ID NO: 4673;
   [0469] (iv) a second spacer comprising the nucleotide sequence of GATAGTTA, or a nucleotide sequence having at least one, two, or three modifications, but no more than four modifications of GATAGTTA; and
   [0470] (v) a third encoded miR122 binding site comprising the nucleotide sequence of SEQ ID NO: 4673, or a nucleotide sequence substantially identical (e.g., having at least 70%, 75%, 80%, 85%, 90%, 92%, 95%, 97%, 98%, or 99% sequence identity) thereto; or a nucleotide sequence having at least one, two, three, four, five, six, or seven modifications, but no more than ten modifications of SEQ ID NO: 4673.
      582. The AAV particle of any of one of embodiments 547-581, wherein the genetic element comprises:
[0471] (i) the nucleotide sequence of any of SEQ ID NOs: 5163-5179 5185-5190, 5343, 5374, 5375, 6500, 6501, 6502, 6503, 6504, 6505, 6506, 6507, 6508, or 6509 or a sequence with at least 95% sequence identity thereto; and/or
[0472] (ii) is single stranded.
   583. The AAV particle of any one of embodiments 547-582, wherein the genetic element is self-complementary.
   584. The AAV particle of any one of embodiments 547-583, wherein the genetic element comprises in 5′ to 3′ order:
[0473] (i) a 5′ adeno-associated (AAV) ITR, optionally wherein the 5′ AAV ITR comprises the nucleotide sequence of SEQ ID NO: 6559;
[0474] (ii) a CB promoter, optionally wherein the CB promoter comprises the nucleotide sequence of SEQ ID NO: 6566;
[0475] (iii) an ie exon 1 region, optionally wherein the ie exon 1 region comprises the nucleotide of SEQ ID NO: 6573;
[0476] (iv) an intron region, optionally wherein the intron region comprises the nucleotide sequence of SEQ ID NO: 6578 and SEQ ID NO: 6580;
[0477] (v) a human beta-globin exon region, optionally wherein the human beta-globin exon region comprises the nucleotide sequence of SEQ ID NO: 6576;
[0478] (vi) a signal sequence, optionally wherein the signal sequence comprises the nucleotide sequence of SEQ ID NO: 5157;
[0479] (vii) a transgene encoding a heavy chain variable region (VH) comprising a nucleotide sequence with at least 90% (e.g., at least about 95, 96, 97, 98, or 99%) sequence identity to the nucleotide sequence of SEQ ID NO: 5002;
[0480] (viii) an encoded heavy chain constant region, optionally wherein the nucleotide sequence encoding the heavy chain constant region comprises the nucleotide sequence of SEQ ID NO: 5003;
[0481] (ix) an encoded furin cleavage site, optionally wherein the nucleotide sequence encoding the furin cleavage site comprises the nucleotide sequence of SEQ ID NO: 1724;
[0482] (x) an encoded T2A linker, optionally wherein the nucleotide sequence encoding the T2A linker comprises the nucleotide sequence of SEQ ID NO: 1726;
[0483] (xi) a signal sequence, optionally wherein the signal sequence comprises the nucleotide sequence of SEQ ID NO: 5159;
[0484] (xii) a transgene encoding a light chain variable region (VL) comprising a nucleotide sequence with at least 90% (e.g., at least about 95, 96, 97, 98, or 99%) sequence identity to the nucleotide sequence of SEQ ID NO: 5005;
[0485] (xiii) an encoded light chain constant region, optionally wherein the nucleotide sequence encoding the light chain constant region comprises the nucleotide sequence of SEQ ID NO: 5007;
[0486] (xiv) a rabbit globin polyA signal region, optionally wherein the rabbit globin polyA signal region comprises the nucleotide sequence of SEQ ID NO: 6590; and
[0487] (xv) a 3′ AAV ITR, optionally wherein the 3′ AAV ITR comprises the nucleotide sequence of SEQ ID NO: 6561.
   585. The AAV particle of any one of embodiments 547-583, wherein the genetic element comprises in 5′ to 3′ order:
[0488] (i) a 5′ adeno-associated (AAV) ITR, optionally wherein the 5′ AAV ITR comprises the nucleotide sequence of SEQ ID NO: 6559;
[0489] (ii) a CB promoter, optionally wherein the CB promoter comprises the nucleotide sequence of SEQ ID NO: 6566;
[0490] (iii) an ie exon 1 region, optionally wherein the ie exon 1 region comprises the nucleotide of SEQ ID NO: 6573;
[0491] (iv) an intron region, optionally wherein the intron region comprises the nucleotide sequence of SEQ ID NO: 6578 and SEQ ID NO: 6580;
[0492] (v) a human beta-globin exon region, optionally wherein the human beta-globin exon region comprises the nucleotide sequence of SEQ ID NO: 6576;
[0493] (vi) a signal sequence, optionally wherein the signal sequence comprises the nucleotide sequence of SEQ ID NO: 5157;
[0494] (vii) a transgene encoding a heavy chain variable region (VH) comprising a nucleotide sequence with at least 90% (e.g., at least about 95, 96, 97, 98, or 99%) sequence identity to the nucleotide sequence of SEQ ID NO: 5171;
[0495] (viii) an encoded heavy chain constant region, optionally wherein the nucleotide sequence encoding the heavy chain constant region comprises the nucleotide sequence of SEQ ID NO: 5011;
[0496] (ix) an encoded furin cleavage site, optionally wherein the nucleotide sequence encoding the furin cleavage site comprises the nucleotide sequence of SEQ ID NO: 1724;
[0497] (x) an encoded T2A linker, optionally wherein the nucleotide sequence encoding the T2A linker comprises the nucleotide sequence of SEQ ID NO: 1726;
[0498] (xi) a signal sequence, optionally wherein the signal sequence comprises the nucleotide sequence of SEQ ID NO: 5159;
[0499] (xii) a transgene encoding a light chain variable region (VL) comprising a nucleotide sequence with at least 90% (e.g., at least about 95, 96, 97, 98, or 99%) sequence identity to the nucleotide sequence of SEQ ID NO: 5175;
[0500] (xiii) an encoded light chain constant region, optionally wherein the nucleotide sequence encoding the light chain constant region comprises the nucleotide sequence of SEQ ID NO: 5007;
[0501] (xiv) a rabbit globin polyA signal region, optionally wherein the rabbit globin polyA signal region comprises the nucleotide sequence of SEQ ID NO: 6590; and
[0502] (xv) a 3′ AAV ITR, optionally wherein the 3′ AAV ITR comprises the nucleotide sequence of SEQ ID NO: 6561.
   586. The AAV particle of any one of embodiments 547-583, wherein the genetic element comprises in 5′ to 3′ order:
[0503] (i) a 5′ adeno-associated (AAV) ITR, optionally wherein the 5′ AAV ITR comprises the nucleotide sequence of SEQ ID NO: 6559;
[0504] (ii) a CMV(IE) promoter and/or enhancer, optionally wherein the CMV(IE) promoter and/or enhancer comprises the nucleotide sequence of SEQ ID NO: 6594;
[0505] (iii) a CB promoter, optionally wherein the CB promoter comprises the nucleotide sequence of SEQ ID NO: 6566;
[0506] (iv) a human beta-globin intron region, optionally wherein the human beta-globin intron region comprises the nucleotide sequence of SEQ ID NO: 6595;
[0507] (v) a signal sequence, optionally wherein the signal sequence comprises the nucleotide sequence of SEQ ID NO: 5157;
[0508] (vi) a transgene encoding a heavy chain variable region (VH) comprising a nucleotide sequence with at least 90% (e.g., at least about 95, 96, 97, 98, or 99%) sequence identity to the nucleotide sequence of SEQ ID NO: 5009;
[0509] (vii) an encoded heavy chain constant region, optionally wherein the nucleotide sequence encoding the heavy chain constant region comprises the nucleotide sequence of SEQ ID NO: 5011;
[0510] (viii) an encoded furin cleavage site, optionally wherein the nucleotide sequence encoding the furin cleavage site comprises the nucleotide sequence of SEQ ID NO: 1724;
[0511] (ix) an encoded T2A linker, optionally wherein the nucleotide sequence encoding the T2A linker comprises the nucleotide sequence of SEQ ID NO: 1726;
[0512] (x) a signal sequence, optionally wherein the signal sequence comprises the nucleotide sequence of SEQ ID NO: 5159;
[0513] (xi) a C12 Fynomer sequence, optionally wherein the C12 Fynomer sequence comprises the nucleotide sequence of SEQ ID NO: 5155;
[0514] (xii) an encoded glycine-serine linker, optionally wherein the nucleotide sequence encoding the glycine-serine linker comprises the nucleotide sequence of SEQ ID NO: 5347;
[0515] (xiii) a transgene encoding a light chain variable region (VL) comprising a nucleotide sequence with at least 90% (e.g., at least about 95, 96, 97, 98, or 99%) sequence identity to the nucleotide sequence of SEQ ID NO: 5013;
[0516] (xiv) an encoded light chain constant region, optionally wherein the nucleotide sequence encoding the light chain constant region comprises the nucleotide sequence of SEQ ID NO: 5007;
[0517] (xv) a rabbit globin polyA signal region, optionally wherein the rabbit globin polyA signal region comprises the nucleotide sequence of SEQ ID NO: 6590; and
[0518] (xvi) a 3′ AAV ITR, optionally wherein the 3′ AAV ITR comprises the nucleotide sequence of SEQ ID NO: 6561.
   587. The AAV particle of any one of embodiments 547-583, wherein the genetic element comprises in 5′ to 3′ order:
[0519] (i) a 5′ adeno-associated (AAV) ITR, optionally wherein the 5′ AAV ITR comprises the nucleotide sequence of SEQ ID NO: 6559;
[0520] (ii) a CMV(IE) promoter and/or enhancer, optionally wherein the CMV(IE) promoter and/or enhancer comprises the nucleotide sequence of SEQ ID NO: 6594;
[0521] (iii) a CB promoter, optionally wherein the CB promoter comprises the nucleotide sequence of SEQ ID NO: 6566;
[0522] (iv) an intron region, optionally wherein the intron region comprises the nucleotide sequence of SEQ ID NO: 6595;
[0523] (v) a signal sequence, optionally wherein the signal sequence comprises the nucleotide sequence of SEQ ID NO: 5157;
[0524] (vi) a transgene encoding a heavy chain variable region (VH) comprising a nucleotide sequence with at least 90% (e.g., at least about 95, 96, 97, 98, or 99%) sequence identity to the nucleotide sequence of SEQ ID NO: 5015;
[0525] (vii) an encoded heavy chain constant region, optionally wherein the nucleotide sequence encoding the heavy chain constant region comprises the nucleotide sequence of SEQ ID NO: 5017;
[0526] (viii) an encoded furin cleavage site, optionally wherein the nucleotide sequence encoding the furin cleavage site comprises the nucleotide sequence of SEQ ID NO: 1724;
[0527] (ix) an encoded T2A linker, optionally wherein the nucleotide sequence encoding the T2A linker comprises the nucleotide sequence of SEQ ID NO: 1726;
[0528] (x) a signal sequence, optionally wherein the signal sequence comprises the nucleotide sequence of SEQ ID NO: 5159;
[0529] (xi) a transgene encoding a light chain variable region (VL) comprising a nucleotide sequence with at least 90% (e.g., at least about 95, 96, 97, 98, or 99%) sequence identity to the nucleotide sequence of SEQ ID NO: 5019;
[0530] (xii) an encoded light chain constant region, optionally wherein the nucleotide sequence encoding the light chain constant region comprises the nucleotide sequence of SEQ ID NO: 5021;
[0531] (xiii) a rabbit globin polyA signal region, optionally wherein the rabbit globin polyA signal region comprises the nucleotide sequence of SEQ ID NO: 6590; and
[0532] (xiv) a 3′ AAV ITR, optionally wherein the 3′ AAV ITR comprises the nucleotide sequence of SEQ ID NO: 6561.
   588. The AAV particle of any one of embodiments 547-583, wherein the genetic element comprises in 5′ to 3′ order:
[0533] (i) a 5′ adeno-associated (AAV) ITR, optionally wherein the 5′ AAV ITR comprises the nucleotide sequence of SEQ ID NO: 6559;
[0534] (ii) a CMV(IE) promoter and/or enhancer, optionally wherein the CMV(IE) promoter and/or enhancer comprises the nucleotide sequence of SEQ ID NO: 6594;
[0535] (iii) a CB promoter, optionally wherein the CB promoter comprises the nucleotide sequence of SEQ ID NO: 6566;
[0536] (iv) an intron region, optionally wherein the intron region comprises the nucleotide sequence of SEQ ID NO: 6595;
[0537] (v) a signal sequence, optionally wherein the signal sequence comprises the nucleotide sequence of SEQ ID NO: 5157;
[0538] (vi) a transgene encoding a heavy chain variable region (VH) comprising a nucleotide sequence with at least 90% (e.g., at least about 95, 96, 97, 98, or 99%) sequence identity to the nucleotide sequence of SEQ ID NO: 5070;
[0539] (vii) an encoded heavy chain constant region, optionally wherein the nucleotide sequence encoding the heavy chain constant region comprises the nucleotide sequence of SEQ ID NO: 5025;
[0540] (viii) an encoded furin cleavage site, optionally wherein the nucleotide sequence encoding the furin cleavage site comprises the nucleotide sequence of SEQ ID NO: 1724;
[0541] (ix) an encoded T2A linker, optionally wherein the nucleotide sequence encoding the T2A linker comprises the nucleotide sequence of SEQ ID NO: 1726;
[0542] (x) a signal sequence, optionally wherein the signal sequence comprises the nucleotide sequence of SEQ ID NO: 5159;
[0543] (xi) a transgene encoding a light chain variable region (VL) comprising a nucleotide sequence with at least 90% (e.g., at least about 95, 96, 97, 98, or 99%) sequence identity to the nucleotide sequence of SEQ ID NO: 5085;
[0544] (xii) an encoded light chain constant region, optionally wherein the nucleotide sequence encoding the light chain constant region comprises the nucleotide sequence of SEQ ID NO: 5007;
[0545] (xiii) a rabbit globin polyA signal region, optionally wherein the rabbit globin polyA signal region comprises the nucleotide sequence of SEQ ID NO: 6590; and
[0546] (xiv) a 3′ AAV ITR, optionally wherein the 3′ AAV ITR comprises the nucleotide sequence of SEQ ID NO: 6561.
   589. The AAV particle of any one of embodiments 547-583, wherein the genetic element comprises in 5′ to 3′ order:
[0547] (i) a 5′ adeno-associated (AAV) ITR, optionally wherein the 5′ AAV ITR comprises the nucleotide sequence of SEQ ID NO: 6559;
[0548] (ii) a CMV(IE) promoter and/or enhancer, optionally wherein the CMV(IE) promoter and/or enhancer comprises the nucleotide sequence of SEQ ID NO: 6594;
[0549] (iii) a CB promoter, optionally wherein the CB promoter comprises the nucleotide sequence of SEQ ID NO: 6566;
[0550] (iv) an intron region, optionally wherein the intron region comprises the nucleotide sequence of SEQ ID NO: 6595;
[0551] (v) a signal sequence, optionally wherein the signal sequence comprises the nucleotide sequence of SEQ ID NO: 5157;
[0552] (vi) a transgene encoding a heavy chain variable region (VH) comprising a nucleotide sequence with at least 90% (e.g., at least about 95, 96, 97, 98, or 99%) sequence identity to the nucleotide sequence of SEQ ID NO: 5089;
[0553] (vii) an encoded heavy chain constant region, optionally wherein the nucleotide sequence encoding the heavy chain constant region comprises the nucleotide sequence of SEQ ID NO: 5029;
[0554] (viii) an encoded furin cleavage site, optionally wherein the nucleotide sequence encoding the furin cleavage site comprises the nucleotide sequence of SEQ ID NO: 1724;
[0555] (ix) an encoded T2A linker, optionally wherein the nucleotide sequence encoding the T2A linker comprises the nucleotide sequence of SEQ ID NO: 1726;
[0556] (x) a signal sequence, optionally wherein the signal sequence comprises the nucleotide sequence of SEQ ID NO: 5159;
[0557] (xi) a transgene encoding a light chain variable region (VL) comprising a nucleotide sequence with at least 90% (e.g., at least about 95, 96, 97, 98, or 99%) sequence identity to the nucleotide sequence of SEQ ID NO: 5093;
[0558] (xii) an encoded light chain constant region, optionally wherein the nucleotide sequence encoding the light chain constant region comprises the nucleotide sequence of SEQ ID NO: 5007;
[0559] (xiii) a rabbit globin polyA signal region, optionally wherein the rabbit globin polyA signal region comprises the nucleotide sequence of SEQ ID NO: 6590; and
[0560] (xiv) a 3′ AAV ITR, optionally wherein the 3′ AAV ITR comprises the nucleotide sequence of SEQ ID NO: 6561.
   590. The AAV particle of any one of embodiments 547-583, wherein the genetic element comprises in 5′ to 3′ order:
[0561] (i) a 5′ adeno-associated (AAV) ITR, optionally wherein the 5′ AAV ITR comprises the nucleotide sequence of SEQ ID NO: 6559;
[0562] (ii) a CMV(IE) promoter and/or enhancer, optionally wherein the CMV(IE) promoter and/or enhancer comprises the nucleotide sequence of SEQ ID NO: 6594;
[0563] (iii) a CB promoter, optionally wherein the CB promoter comprises the nucleotide sequence of SEQ ID NO: 6566;
[0564] (iv) an intron region, optionally wherein the intron region comprises the nucleotide sequence of SEQ ID NO: 6595;
[0565] (v) a signal sequence, optionally wherein the signal sequence comprises the nucleotide sequence of SEQ ID NO: 5157;
[0566] (vi) a transgene encoding a heavy chain variable region (VH) comprising a nucleotide sequence with at least 90% (e.g., at least about 95, 96, 97, 98, or 99%) sequence identity to the nucleotide sequence of SEQ ID NO: 5109;
[0567] (vii) an encoded heavy chain constant region, optionally wherein the nucleotide sequence encoding the heavy chain constant region comprises the nucleotide sequence of SEQ ID NO: 5017;
[0568] (viii) an encoded furin cleavage site, optionally wherein the nucleotide sequence encoding the furin cleavage site comprises the nucleotide sequence of SEQ ID NO: 1724;
[0569] (ix) an encoded T2A linker, optionally wherein the nucleotide sequence encoding the T2A linker comprises the nucleotide sequence of SEQ ID NO: 1726;
[0570] (x) a signal sequence, optionally wherein the signal sequence comprises the nucleotide sequence of SEQ ID NO: 5159;
[0571] (xi) a transgene encoding a light chain variable region (VL) comprising a nucleotide sequence with at least 90% (e.g., at least about 95, 96, 97, 98, or 99%) sequence identity to the nucleotide sequence of SEQ ID NO: 5113;
[0572] (xii) an encoded light chain constant region, optionally wherein the nucleotide sequence encoding the light chain constant region comprises the nucleotide sequence of SEQ ID NO: 5007;
[0573] (xiii) a rabbit globin polyA signal region, optionally wherein the rabbit globin polyA signal region comprises the nucleotide sequence of SEQ ID NO: 6590; and
[0574] (xiv) a 3′ AAV ITR, optionally wherein the 3′ AAV ITR comprises the nucleotide sequence of SEQ ID NO: 6561.
   591. The AAV particle of any one of embodiments 547-583, wherein the genetic element comprises in 5′ to 3′ order:
[0575] (i) a 5′ adeno-associated (AAV) ITR, optionally wherein the 5′ AAV ITR comprises the nucleotide sequence of SEQ ID NO: 6559;
[0576] (ii) a CB promoter, optionally wherein the CB promoter comprises the nucleotide sequence of SEQ ID NO: 6566;
[0577] (iii) an ie exon 1 region, optionally wherein the ie exon 1 region comprises the nucleotide of SEQ ID NO: 6573;
[0578] (iv) an intron region, optionally wherein the intron region comprises the nucleotide sequence of SEQ ID NO: 6578 and SEQ ID NO: 6580;
[0579] (v) a human beta-globin exon region, optionally wherein the human beta-globin exon region comprises the nucleotide sequence of SEQ ID NO: 6576;
[0580] (vi) a signal sequence, optionally wherein the signal sequence comprises the nucleotide sequence of SEQ ID NO: 5157;
[0581] (vii) a transgene encoding a heavy chain variable region (VH) comprising a nucleotide sequence with at least 90% (e.g., at least about 95, 96, 97, 98, or 99%) sequence identity to the nucleotide sequence of SEQ ID NO: 5191;
[0582] (viii) an encoded heavy chain constant region, optionally wherein the nucleotide sequence encoding the heavy chain constant region comprises the nucleotide sequence of SEQ ID NO: 5211;
[0583] (ix) an encoded furin cleavage site, optionally wherein the nucleotide sequence encoding the furin cleavage site comprises the nucleotide sequence of SEQ ID NO: 1724;
[0584] (x) an encoded T2A linker, optionally wherein the nucleotide sequence encoding the T2A linker comprises the nucleotide sequence of SEQ ID NO: 1726;
[0585] (xi) a signal sequence, optionally wherein the signal sequence comprises the nucleotide sequence of SEQ ID NO: 5159;
[0586] (xii) a transgene encoding a light chain variable region (VL) comprising a nucleotide sequence with at least 90% (e.g., at least about 95, 96, 97, 98, or 99%) sequence identity to the nucleotide sequence of SEQ ID NO: 5195;
[0587] (xiii) an encoded light chain constant region, optionally wherein the nucleotide sequence encoding the light chain constant region comprises the nucleotide sequence of SEQ ID NO: 5007;
[0588] (xiv) a rabbit globin polyA signal region, optionally wherein the rabbit globin polyA signal region comprises the nucleotide sequence of SEQ ID NO: 6590; and
[0589] (xv) a 3′ AAV ITR, optionally wherein the 3′ AAV ITR comprises the nucleotide sequence of SEQ ID NO: 6561.
   592. The AAV particle of any one of embodiments 547-583, wherein the genetic element comprises in 5′ to 3′ order:
[0590] (i) a 5′ adeno-associated (AAV) ITR, optionally wherein the 5′ AAV ITR comprises the nucleotide sequence of SEQ ID NO: 6559;
[0591] (ii) a CB promoter, optionally wherein the CB promoter comprises the nucleotide sequence of SEQ ID NO: 6566;
[0592] (iii) an ie exon 1 region, optionally wherein the ie exon 1 region comprises the nucleotide of SEQ ID NO: 6573;
[0593] (iv) an intron region, optionally wherein the intron region comprises the nucleotide sequence of SEQ ID NO: 6578 and SEQ ID NO: 6580;
[0594] (v) a human beta-globin exon region, optionally wherein the human beta-globin exon region comprises the nucleotide sequence of SEQ ID NO: 6576;
[0595] (vi) a signal sequence, optionally wherein the signal sequence comprises the nucleotide sequence of SEQ ID NO: 5157;
[0596] (vii) a transgene encoding a heavy chain variable region (VH) encoded by a nucleotide sequence comprising a nucleotide sequence with at least 90% (e.g., at least about 95, 96, 97, 98, or 99%) sequence identity to the nucleotide sequence of SEQ ID NO: 5223;
[0597] (viii) an encoded heavy chain constant region, optionally wherein the nucleotide sequence encoding the heavy chain constant region comprises the nucleotide sequence of SEQ ID NO: 5213;
[0598] (ix) an encoded furin cleavage site, optionally wherein the nucleotide sequence encoding the furin cleavage site comprises the nucleotide sequence of SEQ ID NO: 1724;
[0599] (x) an encoded T2A linker, optionally wherein the nucleotide sequence encoding the T2A linker comprises the nucleotide sequence of SEQ ID NO: 1726;
[0600] (xi) a signal sequence, optionally wherein the signal sequence comprises the nucleotide sequence of SEQ ID NO: 5159;
[0601] (xii) a transgene encoding a light chain variable region (VL) encoded by a nucleotide sequence comprising a nucleotide sequence with at least 90% (e.g., at least about 95, 96, 97, 98, or 99%) sequence identity to the nucleotide sequence of SEQ ID NO: 5227;
[0602] (xiii) an encoded light chain constant region, optionally wherein the nucleotide sequence encoding the light chain constant region comprises the nucleotide sequence of SEQ ID NO: 5007;
[0603] (xiv) a rabbit globin polyA signal region, optionally wherein the rabbit globin polyA signal region comprises the nucleotide sequence of SEQ ID NO: 6590; and
[0604] (xv) a 3′ AAV ITR, optionally wherein the 3′ AAV ITR comprises the nucleotide sequence of SEQ ID NO: 6561.
   593. The AAV particle of any one of embodiments 547-583, wherein the genetic element comprises in 5′ to 3′ order:
[0605] (i) (i) a 5′ adeno-associated (AAV) ITR, optionally wherein the 5′ AAV ITR comprises the nucleotide sequence of SEQ ID NO: 6559;
[0606] (ii) a CMV(IE) promoter and/or enhancer, optionally wherein the CMV(IE) promoter and/or enhancer comprises the nucleotide sequence of SEQ ID NO: 6594;
[0607] (iii) a CB promoter, optionally wherein the CB promoter comprises the nucleotide sequence of SEQ ID NO: 6566;
[0608] (iv) ie exon 1 region, optionally wherein the ie exon 1 region comprises the nucleotide sequence of SEQ ID NO: 6573;
[0609] (iv) an intron region, optionally wherein the intron region comprises the nucleotide sequence of SEQ ID NO: 6578 and SEQ ID NO: 6580;
[0610] (v) a human beta-globin exon region, optionally wherein the human beta-globin exon region comprises the nucleotide sequence of SEQ ID NO: 6576;
[0611] (vi) a signal sequence, optionally wherein the signal sequence comprises the nucleotide sequence of SEQ ID NO: 5157;
[0612] (vii) a transgene encoding a heavy chain variable region (VH) comprising a nucleotide sequence with at least 90% (e.g., at least about 95, 96, 97, 98, or 99%) sequence identity to the nucleotide sequence of SEQ ID NO: 5253;
[0613] (viii) an encoded glycine-serine linker, optionally wherein the glycine-serine linker is encoded by the nucleotide sequence of SEQ ID NO: 5347;
[0614] (ix) a transgene encoding a light chain variable region (VL) comprising a nucleotide sequence with at least 90% (e.g., at least about 95, 96, 97, 98, or 99%) sequence identity to the nucleotide sequence of SEQ ID NO: 5255;
[0615] (x) an encoded light chain constant region, optionally wherein the nucleotide sequence encoding the light chain constant region comprises the nucleotide sequence of SEQ ID NO: 5277;
[0616] (xi) a rabbit globin polyA signal region, optionally wherein the rabbit globin polyA signal region comprises the nucleotide sequence of SEQ ID NO: 6590; and
[0617] (xii) a 3′ AAV ITR, optionally wherein the 3′ AAV ITR comprises the nucleotide sequence of SEQ ID NO: 6561.
   594. The AAV particle of any one of embodiments 547-583, wherein the genetic element comprises in 5′ to 3′ order:
[0618] (i) a 5′ adeno-associated (AAV) ITR, optionally wherein the 5′ AAV ITR comprises the nucleotide sequence of SEQ ID NO: 6559;
[0619] (ii) a GFAP promoter and/or enhancer, optionally wherein the GFAP comprises the nucleotide sequence of SEQ ID NO: 6568;
[0620] (iii) a human beta-globin intron region, optionally wherein the human beta-globin intron region comprises the nucleotide sequence of SEQ ID NO 6595;
[0621] (iv) a signal sequence, optionally wherein the signal sequence comprises the nucleotide sequence of SEQ ID NO: 5157;
[0622] (v) a transgene encoding a heavy chain variable region (VH) comprising a nucleotide sequence with at least 90% (e.g., at least about 95, 96, 97, 98, or 99%) sequence identity to the nucleotide sequence of SEQ ID NO: 5129;
[0623] (vi) an encoded heavy chain constant region, optionally wherein the nucleotide sequence encoding the heavy chain constant region comprises the nucleotide sequence of SEQ ID NO: 5017;
[0624] (vii) an encoded furin cleavage site, optionally wherein the nucleotide sequence encoding the furin cleavage site comprises the nucleotide sequence of SEQ ID NO: 1724;
[0625] (viii) an encoded T2A linker, optionally wherein the nucleotide sequence encoding the T2A linker comprises the nucleotide sequence of SEQ ID NO: 1726;
[0626] (ix) a signal sequence, optionally wherein the signal sequence comprises the nucleotide sequence of SEQ ID NO: 5159;
[0627] (x) a transgene encoding a light chain variable region (VL) comprising a nucleotide sequence with at least 90% (e.g., at least about 95, 96, 97, 98, or 99%) sequence identity to the nucleotide sequence of SEQ ID NO: 5133;
[0628] (xi) an encoded light chain constant region, optionally wherein the nucleotide sequence encoding the light chain constant region comprises the nucleotide sequence of SEQ ID NO: 5021;
[0629] (xii) a rabbit globin polyA signal region, optionally wherein the rabbit globin polyA signal region comprises the nucleotide sequence of SEQ ID NO: 6590; and
[0630] (xiii) a 3′ AAV ITR, optionally wherein the 3′ AAV ITR comprises the nucleotide sequence of SEQ ID NO: 6561.
   595. The AAV particle of any one of embodiments 547-583, wherein the genetic element comprises in 5′ to 3′ order:
[0631] (i) a 5′ adeno-associated (AAV) ITR, optionally wherein the 5′ AAV ITR comprises the nucleotide sequence of SEQ ID NO: 6559;
[0632] (ii) a CB promoter, optionally wherein the CB promoter comprises the nucleotide sequence of SEQ ID NO: 6566;
[0633] (iii) an ie exon 1 region, optionally wherein the ie exon 1 region comprises the nucleotide of SEQ ID NO: 6573;
[0634] (iv) an intron region, optionally wherein the intron region comprises the nucleotide sequence of SEQ ID NO: 6578 and SEQ ID NO: 6580;
[0635] (v) a human beta-globin exon region, optionally wherein the human beta-globin exon region comprises the nucleotide sequence of SEQ ID NO: 6576;
[0636] (vi) a signal sequence, optionally wherein the signal sequence comprises the nucleotide sequence of SEQ ID NO: 5157;
[0637] (vii) a transgene encoding a heavy chain variable region (VH) comprising a nucleotide sequence with at least 90% (e.g., at least about 95, 96, 97, 98, or 99%) sequence identity to the nucleotide sequence of SEQ ID NO: 5257;
[0638] (viii) an encoded glycine-serine linker, optionally wherein the glycine-serine linker is encoded by the nucleotide sequence of SEQ ID NO: 5347;
[0639] (xii) a transgene encoding a light chain variable region (VL) comprising a nucleotide sequence with at least 90% (e.g., at least about 95, 96, 97, 98, or 99%) sequence identity to the nucleotide sequence of SEQ ID NO: 5259;
[0640] (xiii) an encoded light chain constant region, optionally wherein the nucleotide sequence encoding the light chain constant region comprises the nucleotide sequence of SEQ ID NO: 5279;
[0641] (ix) a rabbit globin polyA signal region, optionally wherein the rabbit globin polyA signal region comprises the nucleotide sequence of SEQ ID NO: 6590; and
[0642] (x) a 3′ AAV ITR, optionally wherein the 3′ AAV ITR comprises the nucleotide sequence of SEQ ID NO: 6561.
   596. The AAV particle of any one of embodiments 547-583, wherein the genetic element comprises in 5′ to 3′ order:
[0643] (i) a 5′ adeno-associated (AAV) ITR, optionally wherein the 5′ AAV ITR comprises the nucleotide sequence of SEQ ID NO: 6559;
[0644] (ii) a CB promoter, optionally wherein the CB promoter comprises the nucleotide sequence of SEQ ID NO: 6566;
[0645] (iii) an ie exon 1 region, optionally wherein the ie exon 1 region comprises the nucleotide of SEQ ID NO: 6573;
[0646] (iv) an intron region, optionally wherein the intron region comprises the nucleotide sequence of SEQ ID NO: 6578 and SEQ ID NO: 6580;
[0647] (v) a human beta-globin exon region, optionally wherein the human beta-globin exon region comprises the nucleotide sequence of SEQ ID NO: 6576;
[0648] (vi) a signal sequence, optionally wherein the signal sequence comprises the nucleotide sequence of SEQ ID NO: 5157;
[0649] (vii) a transgene encoding a heavy chain variable region (VH) encoded by a nucleotide sequence comprising a nucleotide sequence with at least 90% (e.g., at least about 95, 96, 97, 98, or 99%) sequence identity to the nucleotide sequence of SEQ ID NO: 5261;
[0650] (viii) an encoded heavy chain constant region, optionally wherein the heavy chain constant region is encoded by the nucleotide sequence of SEQ ID NO: 5215;
[0651] (ix) an encoded furin cleavage site, optionally wherein the nucleotide sequence encoding the furin cleavage site comprises the nucleotide sequence of SEQ ID NO: 6557;
[0652] (x) an encoded T2A linker, optionally wherein the nucleotide sequence encoding the T2A linker comprises the nucleotide sequence of SEQ ID NO: 6558;
[0653] (xi) a signal sequence, optionally wherein the signal sequence comprises the nucleotide sequence of SEQ ID NO: 5159;
[0654] (xii) a transgene encoding a heavy chain variable region comprising a nucleotide sequence with at least 90% (e.g., at least about 95, 96, 97, 98, or 99%) sequence identity to the nucleotide sequence of SEQ ID NO: 5289;
[0655] (xiii) an encoded glycine-serine linker, optionally wherein the glycine-serine linker is encoded by the nucleotide sequence of SEQ ID NO: 5347;
[0656] (xiv) a transgene encoding a light chain variable region (VL) comprising a nucleotide sequence with at least 90% (e.g., at least about 95, 96, 97, 98, or 99%) sequence identity to the nucleotide sequence of SEQ ID NO: 6552;
[0657] (xv) an encoded glycine-serine linker, optionally wherein the glycine-serine linker is encoded by the nucleotide sequence of GGCTCT;
[0658] (xvi) a transgene encoding a light chain variable region (VL) comprising a nucleotide sequence with at least 90% (e.g., at least about 95, 96, 97, 98, or 99%) sequence identity to the nucleotide sequence of SEQ ID NO: 5353;
[0659] (xvii) an encoded light chain constant region, optionally wherein the nucleotide sequence encoding the light chain constant region comprises a nucleotide sequence with at least 90% (e.g., at least about 95, 96, 97, 98, or 99%) sequence identity to the nucleotide sequence of SEQ ID NO: 5217;
[0660] (xviii) a rabbit globin polyA signal region, optionally wherein the rabbit globin polyA signal region comprises the nucleotide sequence of SEQ ID NO: 6590; and
[0661] (xix) a 3′ AAV ITR, optionally wherein the 3′ AAV ITR comprises the nucleotide sequence of SEQ ID NO: 6561.
   597. The AAV particle of any one of embodiments 547-583, wherein the genetic element comprises in 5′ to 3′ order:
[0662] (i) a 5′ adeno-associated (AAV) ITR, optionally wherein the 5′ AAV ITR comprises the nucleotide sequence of SEQ ID NO: 6559;
[0663] (ii) a CB promoter, optionally wherein the CB promoter comprises the nucleotide sequence of SEQ ID NO: 6566;
[0664] (iii) an ie exon 1 region, optionally wherein the ie exon 1 region comprises the nucleotide of SEQ ID NO: 6573;
[0665] (iv) an intron region, optionally wherein the intron region comprises the nucleotide sequence of SEQ ID NO: 6578 and SEQ ID NO: 6580;
[0666] (v) a human beta-globin exon region, optionally wherein the human beta-globin exon region comprises the nucleotide sequence of SEQ ID NO: 6576;
[0667] (vi) a signal sequence, optionally wherein the signal sequence comprises the nucleotide sequence of SEQ ID NO: 5032;
[0668] (vii) a transgene encoding a heavy chain variable region (VH) encoded by a nucleotide sequence comprising a nucleotide sequence with at least 90% (e.g., at least about 95, 96, 97, 98, or 99%) sequence identity to the nucleotide sequence of SEQ ID NO: 5269;
[0669] (viii) an encoded heavy chain constant region, optionally wherein the heavy chain constant region is encoded by a nucleotide sequence comprising a nucleotide sequence with at least 90% (e.g., at least about 95, 96, 97, 98, or 99%) sequence identity to the nucleotide sequence of SEQ ID NO: 5219;
[0670] (ix) an encoded furin cleavage site, optionally wherein the nucleotide sequence encoding the furin cleavage site comprises the nucleotide sequence of SEQ ID NO: 6557;
[0671] (x) an encoded T2A linker, optionally wherein the nucleotide sequence encoding the T2A linker comprises the nucleotide sequence of SEQ ID NO: 6558;
[0672] (xi) a signal sequence, optionally wherein the signal sequence comprises the nucleotide sequence of SEQ ID NO: 5159;
[0673] (xii) a transgene encoding a light chain variable region (VL) encoded by a nucleotide sequence comprising a nucleotide sequence with at least 90% (e.g., at least about 95, 96, 97, 98, or 99%) sequence identity to the nucleotide sequence of SEQ ID NO: 5273;
[0674] (xiii) an encoded light chain constant region, optionally wherein the nucleotide sequence encoding the light chain constant region comprises the nucleotide sequence of SEQ ID NO: 5221;
[0675] (ix) a rabbit globin polyA signal region, optionally wherein the rabbit globin polyA signal region comprises the nucleotide sequence of SEQ ID NO: 6590; and
[0676] (x) a 3′ AAV ITR, optionally wherein the 3′ AAV ITR comprises the nucleotide sequence of SEQ ID NO: 6561.
   598. The AAV particle of any one of embodiments 547-583, wherein the genetic element comprises in 5′ to 3′ order:
[0677] (i) a 5′ adeno-associated (AAV) ITR, optionally wherein the 5′ AAV ITR comprises the nucleotide sequence of SEQ ID NO: 6559;
[0678] (ii) a GFAP promoter, optionally wherein the GFAP promoter comprises the nucleotide sequence of SEQ ID NO: 6568;
[0679] (iii) an ie exon 1 region, optionally wherein the ie exon 1 region comprises the nucleotide of SEQ ID NO: 6573;
[0680] (iv) an intron region, optionally wherein the intron region comprises the nucleotide sequence of SEQ ID NO: 6578 and SEQ ID NO: 6580;
[0681] (v) a human beta-globin exon region, optionally wherein the human beta-globin exon region comprises the nucleotide sequence of SEQ ID NO: 6576;
[0682] (vi) a signal sequence, optionally wherein the signal sequence comprises the nucleotide sequence of SEQ ID NO: 5032;
[0683] (vii) a transgene encoding a heavy chain variable region (VH) encoded by a nucleotide sequence comprising a nucleotide sequence with at least 90% (e.g., at least about 95, 96, 97, 98, or 99%) sequence identity to the nucleotide sequence of SEQ ID NO: 5269;
[0684] (viii) an encoded heavy chain constant region, optionally wherein the heavy chain constant region is encoded by a nucleotide sequence comprising a nucleotide sequence with at least 90% (e.g., at least about 95, 96, 97, 98, or 99%) sequence identity to the nucleotide sequence of SEQ ID NO: 7590;
[0685] (ix) an encoded furin cleavage site, optionally wherein the nucleotide sequence encoding the furin cleavage site comprises the nucleotide sequence of SEQ ID NO: 6557;
[0686] (x) an encoded T2A linker, optionally wherein the nucleotide sequence encoding the T2A linker comprises the nucleotide sequence of SEQ ID NO: 6558;
[0687] (xi) a signal sequence, optionally wherein the signal sequence comprises the nucleotide sequence of SEQ ID NO: 5159;
[0688] (xii) a transgene encoding a light chain variable region (VL) encoded by a nucleotide sequence comprising a nucleotide sequence with at least 90% (e.g., at least about 95, 96, 97, 98, or 99%) sequence identity to the nucleotide sequence of SEQ ID NO: 5273;
[0689] (xiii) an encoded light chain constant region, optionally wherein the nucleotide sequence encoding the light chain constant region comprises the nucleotide sequence of SEQ ID NO: 5221;
[0690] (ix) a rabbit globin polyA signal region, optionally wherein the rabbit globin polyA signal region comprises the nucleotide sequence of SEQ ID NO: 6590; and
[0691] (x) a 3′ AAV ITR, optionally wherein the 3′ AAV ITR comprises the nucleotide sequence of SEQ ID NO: 6561.
   599. The AAV particle of any one of embodiments 547-583, wherein the genetic element comprises in 5′ to 3′ order:
[0692] (i) a 5′ adeno-associated (AAV) ITR, optionally wherein the 5′ AAV ITR comprises the nucleotide sequence of SEQ ID NO: 6559;
[0693] (ii) a GFAP promoter, optionally wherein the GFAP promoter comprises the nucleotide sequence of SEQ ID NO: 6568;
[0694] (iii) an ie exon 1 region, optionally wherein the ie exon 1 region comprises the nucleotide of SEQ ID NO: 6573;
[0695] (iv) an intron region, optionally wherein the intron region comprises the nucleotide sequence of SEQ ID NO: 6578 and SEQ ID NO: 6580;
[0696] (v) a human beta-globin exon region, optionally wherein the human beta-globin exon region comprises the nucleotide sequence of SEQ ID NO: 6576;
[0697] (vi) a signal sequence, optionally wherein the signal sequence comprises the nucleotide sequence of SEQ ID NO: 5032;
[0698] (vii) a transgene encoding a heavy chain variable region (VH) encoded by a nucleotide sequence comprising a nucleotide sequence with at least 90% (e.g., at least about 95, 96, 97, 98, or 99%) sequence identity to the nucleotide sequence of SEQ ID NO: 5269;
[0699] (viii) an encoded heavy chain constant region, optionally wherein the heavy chain constant region is encoded by a nucleotide sequence comprising a nucleotide sequence with at least 90% (e.g., at least about 95, 96, 97, 98, or 99%) sequence identity to the nucleotide sequence of SEQ ID NO: 5219;
[0700] (ix) an encoded furin cleavage site, optionally wherein the nucleotide sequence encoding the furin cleavage site comprises the nucleotide sequence of SEQ ID NO: 6557;
[0701] (x) an encoded T2A linker, optionally wherein the nucleotide sequence encoding the T2A linker comprises the nucleotide sequence of SEQ ID NO: 6558;
[0702] (xi) a signal sequence, optionally wherein the signal sequence comprises the nucleotide sequence of SEQ ID NO: 5159;
[0703] (xii) a transgene encoding a light chain variable region (VL) encoded by a nucleotide sequence comprising a nucleotide sequence with at least 90% (e.g., at least about 95, 96, 97, 98, or 99%) sequence identity to the nucleotide sequence of SEQ ID NO: 5273;
[0704] (xiii) an encoded light chain constant region, optionally wherein the nucleotide sequence encoding the light chain constant region comprises the nucleotide sequence of SEQ ID NO: 5221;
[0705] (ix) a rabbit globin polyA signal region, optionally wherein the rabbit globin polyA signal region comprises the nucleotide sequence of SEQ ID NO: 6590; and
[0706] (x) a 3′ AAV ITR, optionally wherein the 3′ AAV ITR comprises the nucleotide sequence of SEQ ID NO: 6561.
   600. The AAV particle of any one of embodiments 547-583, wherein the genetic element comprises in 5′ to 3′ order:
[0707] (i) a 5′ adeno-associated (AAV) ITR, optionally wherein the 5′ AAV ITR comprises the nucleotide sequence of SEQ ID NO: 6559;
[0708] (ii) a CB promoter, optionally wherein the CB promoter comprises the nucleotide sequence of SEQ ID NO: 6566;
[0709] (iii) an ie exon 1 region, optionally wherein the ie exon 1 region comprises the nucleotide of SEQ ID NO: 6573;
[0710] (iv) an intron region, optionally wherein the intron region comprises the nucleotide sequence of SEQ ID NO: 6578 and SEQ ID NO: 6580;
[0711] (v) a human beta-globin exon region, optionally wherein the human beta-globin exon region comprises the nucleotide sequence of SEQ ID NO: 6576;
[0712] (vi) a signal sequence, optionally wherein the signal sequence comprises the nucleotide sequence of SEQ ID NO: 5032;
[0713] (vii) a transgene encoding a heavy chain variable region (VH) encoded by a nucleotide sequence comprising a nucleotide sequence with at least 90% (e.g., at least about 95, 96, 97, 98, or 99%) sequence identity to the nucleotide sequence of SEQ ID NO: 6512, 6517, 6522, 6527, or 6532;
[0714] (viii) an encoded heavy chain constant region, optionally wherein the heavy chain constant region is encoded by a nucleotide sequence comprising a nucleotide sequence with at least 90% (e.g., at least about 95, 96, 97, 98, or 99%) sequence identity to the nucleotide sequence of SEQ ID NO: 5219;
[0715] (ix) an encoded furin cleavage site, optionally wherein the nucleotide sequence encoding the furin cleavage site comprises the nucleotide sequence of SEQ ID NO: 1724;
[0716] (x) an encoded T2A linker, optionally wherein the nucleotide sequence encoding the T2A linker comprises the nucleotide sequence of SEQ ID NO: 1726;
[0717] (xi) a signal sequence, optionally wherein the signal sequence comprises the nucleotide sequence of SEQ ID NO: 5159;
[0718] (xii) a transgene encoding a light chain variable region (VL) encoded by a nucleotide sequence comprising a nucleotide sequence with at least 90% (e.g., at least about 95, 96, 97, 98, or 99%) sequence identity to the nucleotide sequence of SEQ ID NO: 5273;
[0719] (xiii) an encoded light chain constant region, optionally wherein the nucleotide sequence encoding the light chain constant region comprises the nucleotide sequence of SEQ ID NO: 5221;
[0720] (ix) a rabbit globin polyA signal region, optionally wherein the rabbit globin polyA signal region comprises the nucleotide sequence of SEQ ID NO: 6590; and
[0721] (x) a 3′ AAV ITR, optionally wherein the 3′ AAV ITR comprises the nucleotide sequence of SEQ ID NO: 6561.
   601. The AAV particle of any one of embodiments 547-583, wherein the genetic element comprises in 5′ to 3′ order:
[0722] (i) a 5′ adeno-associated (AAV) ITR, optionally wherein the 5′ AAV ITR comprises the nucleotide sequence of SEQ ID NO: 6559;
[0723] (ii) a CB promoter, optionally wherein the CB promoter comprises the nucleotide sequence of SEQ ID NO: 6566;
[0724] (iii) an ie exon 1 region, optionally wherein the ie exon 1 region comprises the nucleotide of SEQ ID NO: 6573;
[0725] (iv) an intron region, optionally wherein the intron region comprises the nucleotide sequence of SEQ ID NO: 6578 and SEQ ID NO: 6580;
[0726] (v) a human beta-globin exon region, optionally wherein the human beta-globin exon region comprises the nucleotide sequence of SEQ ID NO: 6576;
[0727] (vi) a signal sequence, optionally wherein the signal sequence comprises the nucleotide sequence of SEQ ID NO: 5157;
[0728] (vii) a transgene encoding a heavy chain variable region (VH) encoded by a nucleotide sequence comprising a nucleotide sequence with at least 90% (e.g., at least about 95, 96, 97, 98, or 99%) sequence identity to the nucleotide sequence of SEQ ID NO: 5261;
[0729] (viii) an encoded heavy chain constant region, optionally wherein the heavy chain constant region is encoded by the nucleotide sequence of SEQ ID NO: 5219;
[0730] (ix) an encoded furin cleavage site, optionally wherein the nucleotide sequence encoding the furin cleavage site comprises the nucleotide sequence of SEQ ID NO: 6557;
[0731] (x) an encoded T2A linker, optionally wherein the nucleotide sequence encoding the T2A linker comprises the nucleotide sequence of SEQ ID NO: 6558;
[0732] (xi) a signal sequence, optionally wherein the signal sequence comprises the nucleotide sequence of SEQ ID NO: 5159;
[0733] (xii) a transgene encoding a heavy chain variable region comprising a nucleotide sequence with at least 90% (e.g., at least about 95, 96, 97, 98, or 99%) sequence identity to the nucleotide sequence of SEQ ID NO: 6552, 6512, 6517, 6522, 6527, or 6532;
[0734] (xiii) an encoded glycine-serine linker, optionally wherein the glycine-serine linker is encoded by the nucleotide sequence of SEQ ID NO: 5347;
[0735] (xiv) a transgene encoding a light chain variable region (VL) comprising a nucleotide sequence with at least 90% (e.g., at least about 95, 96, 97, 98, or 99%) sequence identity to the nucleotide sequence of SEQ ID NO: 5265;
[0736] (xv) an encoded glycine-serine linker, optionally wherein the glycine-serine linker is encoded by SEQ ID NO: 5243;
[0737] (xvi) a transgene encoding a light chain variable region (VL) comprising a nucleotide sequence with at least 90% (e.g., at least about 95, 96, 97, 98, or 99%) sequence identity to the nucleotide sequence of SEQ ID NO: 5353;
[0738] (xvii) an encoded light chain constant region, optionally wherein the nucleotide sequence encoding the light chain constant region comprises a nucleotide sequence with at least 90% (e.g., at least about 95, 96, 97, 98, or 99%) sequence identity to the nucleotide sequence of SEQ ID NO: 5217; (xvii) a rabbit globin polyA signal region, optionally wherein the rabbit globin polyA signal region comprises the nucleotide sequence of SEQ ID NO: 6590; and
[0739] (xviii) a 3′ AAV ITR, optionally wherein the 3′ AAV ITR comprises the nucleotide sequence of SEQ ID NO: 6561.
   602. The AAV particle of any one of embodiments 547-583, wherein the genetic element comprises in 5′ to 3′ order:
[0740] (i) a 5′ adeno-associated (AAV) ITR, optionally wherein the 5′ AAV ITR comprises the nucleotide sequence of SEQ ID NO: 6559;
[0741] (ii) a CB promoter, optionally wherein the CB promoter comprises the nucleotide sequence of SEQ ID NO: 6566;
[0742] (iii) an ie exon 1 region, optionally wherein the ie exon 1 region comprises the nucleotide of SEQ ID NO: 6573;
[0743] (iv) an intron region, optionally wherein the intron region comprises the nucleotide sequence of SEQ ID NO: 6578 and SEQ ID NO: 6580;
[0744] (v) a human beta-globin exon region, optionally wherein the human beta-globin exon region comprises the nucleotide sequence of SEQ ID NO: 6576;
[0745] (vi) a signal sequence, optionally wherein the signal sequence comprises the nucleotide sequence of SEQ ID NO: 5157;
[0746] (vii) a transgene encoding a heavy chain variable region (VH) encoded by a nucleotide sequence comprising a nucleotide sequence with at least 90% (e.g., at least about 95, 96, 97, 98, or 99%) sequence identity to the nucleotide sequence of SEQ ID NO: 5002;
[0747] (viii) an encoded heavy chain constant region, optionally wherein the heavy chain constant region is encoded by the nucleotide sequence of SEQ ID NO: 5017;
[0748] (ix) an encoded furin cleavage site, optionally wherein the nucleotide sequence encoding the furin cleavage site comprises the nucleotide sequence of SEQ ID NO: 1724;
[0749] (x) an encoded T2A linker, optionally wherein the nucleotide sequence encoding the T2A linker comprises the nucleotide sequence of SEQ ID NO: 1726;
[0750] (xi) a signal sequence, optionally wherein the signal sequence comprises the nucleotide sequence of SEQ ID NO: 5159;
[0751] (xii) a transgene encoding a DARPIN comprising a nucleotide sequence with at least 90% (e.g., at least about 95, 96, 97, 98, or 99%) sequence identity to the nucleotide sequence of SEQ ID NO: 5371;
[0752] (xiii) an encoded glycine-serine linker, optionally wherein the glycine-serine linker is encoded by the nucleotide sequence of SEQ ID NO: 5347;
[0753] (xiv) a transgene encoding a light chain variable region (VL) comprising a nucleotide sequence with at least 90% (e.g., at least about 95, 96, 97, 98, or 99%) sequence identity to the nucleotide sequence of SEQ ID NO: 5005;
[0754] (xvi) an encoded light chain constant region, optionally wherein the nucleotide sequence encoding the light chain constant region comprises a nucleotide sequence with at least 90% (e.g., at least about 95, 96, 97, 98, or 99%) sequence identity to the nucleotide sequence of SEQ ID NO: 5007;
[0755] (xvii) a rabbit globin polyA signal region, optionally wherein the rabbit globin polyA signal region comprises the nucleotide sequence of SEQ ID NO: 6590; and
[0756] (xviii) a 3′ AAV ITR, optionally wherein the 3′ AAV ITR comprises the nucleotide sequence of SEQ ID NO: 6561.
   603. An isolated, e.g., recombinant, antibody molecule produced by the AAV particle of any one of the preceding embodiments.
   604. The AAV particle of any one of the preceding embodiments, wherein the genetic element further encodes:
[0757] (i) the AAV capsid polypeptide, e.g., the AAV capsid variant, e.g., a structural protein, wherein the capsid protein comprises a VP1 polypeptide, a VP2 polypeptide, and/or a VP3 polypeptide, optionally wherein the VP1 polypeptide, the VP2 polypeptide, and/or the VP3 polypeptide are encoded by at least one Cap gene; and/or
[0758] (ii) a Rep protein, e.g., a non-structural protein, wherein the Rep protein comprises a Rep78 protein, a Rep68, Rep52 protein, and/or a Rep40 protein (e.g., a Rep52 protein and/or Rep78 protein), optionally wherein the Rep78 protein, the Rep68 protein, the Rep52 protein, and/or the Rep40 protein are encoded by at least one Rep gene.
   605. The AAV particle of any one of embodiments 1-604, wherein the genetic element further comprises a nucleic acid encoding:
[0759] (i) the AAV capsid polypeptide, e.g., the AAV capsid variant, e.g., a structural protein, wherein the capsid protein comprises a VP1 polypeptide, a VP2 polypeptide, and/or a VP3 polypeptide, optionally wherein the VP1 polypeptide, the VP2 polypeptide, and/or the VP3 polypeptide are encoded by at least one Cap gene; and/or
[0760] (ii) a Rep protein, e.g., a non-structural protein, wherein the Rep protein comprises a Rep78 protein, a Rep68, Rep52 protein, and/or a Rep40 protein (e.g., a Rep52 protein and/or Rep78 protein), optionally wherein the Rep78 protein, the Rep68 protein, the Rep52 protein, and/or the Rep40 protein are encoded by at least one Rep gene.
   606. A cell, e.g., a host cell, comprising the AAV particle of any one of embodiments 1-202, optionally wherein the cell is a mammalian cell, an insect cell, or a bacterial cell.
   607. A method of making the AAV particle of any one of embodiments 1-605, the method comprising
[0761] (i) providing a host cell a the genetic element; and
[0762] (ii) incubating the host cell under conditions suitable to enclose the genetic element in an AAV capsid variant;
[0763] thereby making the isolated AAV particle.
   608. The method of embodiment 607, further comprising, prior to step (i), introducing a first nucleic acid molecule comprising the genetic element into the host cell.
   609. The method of embodiment 607 or 608, wherein the host cell comprises a second nucleic acid encoding an AAV capsid variant.
   610. The method of embodiment 609, further comprising introducing the second nucleic acid into the cell, optionally wherein the second nucleic acid molecule is introduced into the host cell prior to, concurrently with, or after the first nucleic acid molecule.
   611. A pharmaceutical composition comprising an AAV particle of any one of embodiments 1-605, and a pharmaceutically acceptable excipient.
   612. The pharmaceutical composition of embodiment 611, wherein the pharmaceutically acceptable excipient comprises a buffer, a gel, a hydrogel, or artificial cerebrospinal fluid.
   613. A method of delivering an exogenous antibody molecule that binds to HER2/neu, to a subject, comprising administering an effective amount of the AAV particle of any one of embodiments 1-605 or the pharmaceutical composition of embodiment 611 or 612.
   614. The method of embodiment 613, wherein:
[0764] (i) the subject has, has been diagnosed with having, or is at risk of having a disease associated with expression of HER2/neu; and/or
[0765] (ii) the subject has, has been diagnosed with having, or is at risk of having a cancer expressing HER2/neu.
   615. A method of treating a subject having or diagnosed with having cancer expressing HER2/neu, comprising administering to the subject an effective amount of the AAV particle of any one of embodiments 1-605 or the pharmaceutical composition of embodiment 611 or 612.
   616. The method of any one of embodiments 613-615, wherein the disease associated with HER2/neu expression is a HER2/neu-positive solid tumor.
   617. The method of embodiment 616, wherein the HER2/neu positive tumor is metastatic.
   618. The method of any one of embodiments 616 or 617, wherein the HER/neu positive cancer is breast cancer, gastric cancer, gastroesophageal junction cancer, colorectal cancer, lung cancer (e.g., non-small cell lung carcinoma), pancreatic cancer, bladder cancer, salivary duct cancer, ovarian cancer (e.g., epithelial ovarian cancer), endometrial cancer, prostate cancer, bone cancer and brain cancer.
   619. The method of any one of embodiments 616-618, wherein the HER2/neu positive cancer has metastasized to the central nervous system (CNS).
   620. The method of any one of embodiments 616-619, wherein the HER2/neu positive cancer is breast cancer.
   621. The method of any one of embodiments 613-620, wherein the subject is a human.
   622. The method of any one of embodiments 613-621, wherein the subject has previously undergone localized therapy for a HER2/neu-positive solid tumor.
   623. The method of any one of embodiments 613-622, wherein the subject has previously undergone surgical resection of a HER2/neu-positive solid tumor.
   624. The method of any one of embodiments 613-623, wherein the subject has previously undergone radiotherapy for a HER2/neu-positive solid tumor.
   625. The method of any one of embodiments 613-624, wherein the subject has previously undergone immunotherapy and/or chemotherapy for a HER2/neu-positive solid tumor.
   626. The method of any one of embodiments 613-625, wherein the subject has triple-negative breast cancer.
   627. The method of any one of embodiments 613-626, wherein the HER2/neu positive tumor is refractory.
   628. The method of any one of embodiments 613-627, wherein the method reduces or prevents metastases.
   629. The method of embodiment 628, wherein the metastases are brain metastases.
   630. The method of any one of embodiments 613-629, wherein the AAV particle is administered to the subject intramuscularly, intravenously, intratumorally, intracerebrally, intrathecally, intraarterially, intracerebroventricularly, via intraparenchymal administration, via focused ultrasound (FUS), e.g., coupled with the intravenous administration of microbubbles (FUS-MB), or MRI-guided FUS coupled with intravenous administration, or via intra-cisterna magna injection (ICM).
   631. The method of any one of embodiments 613-630, wherein the AAV particle is administered to the subject intravenously.
   632. The method of any one of embodiments 613-630, wherein the AAV particle is administered to the subject intratumorally.
   633. The method of any one of embodiments 613-630, wherein the AAV particle is administered to the subject via intra-cisterna magna (ICM) injection.
   634. The method of any one of embodiments 613-630, wherein the AAV particle is administered prior to, concurrently with, or post a surgical resection of a HER2/neu-positive solid tumor.
   635. The method of any one of embodiments 613-630, wherein the AAV particle is administered to a site of surgical resection of a HER2/neu-positive solid tumor in the subject.
   636. The method of any one of embodiments 613-633, wherein the AAV particle is administered to the area around a site of surgical resection of a HER2/neu-positive solid tumor, e.g., the margins of the tumor, in the subject.
   637. The method of any one of embodiments 613-636, further comprising administration of an additional therapeutic agent and/or therapy suitable for treatment or prevention of a disorder associated with HER2/neu expression.
   638. The method of embodiment 637, wherein the additional therapeutic agent comprises:
[0766] (i) trastuzumab, pertuzumab, a chemotherapeutic agent, or a combination thereof;
[0767] (ii) trastuzumab emtansine; and/or
[0768] (iii) trastuzumab, tucatinib, capecitabine, Fam-trastuzumab deruxtecan-nxki, Lapatanib/capecitabine, Lapatanib, Margetuximab, a chemotherapeutic agent, Neratanib/capecitabine, or a combination thereof.
   639. The method of any one of embodiments 613-638, wherein the method reduces tumor cell proliferation.
   640. The method of embodiment 639, wherein the method induces an innate immune response to HER2/neu expressing tumor cells.
   641. The method of embodiment 640, wherein the innate immune response comprises an increase in CD45⁺ cells at the tumor site.
   642. The method of embodiment 640 or 641, wherein the innate immune response comprises an increase in the proportion of one or more of the following cell types at the tumor site
[0769] (i) active proliferating microglia;
[0770] (ii) dendritic cells (DC);
[0771] (iii) natural killer cells (NK); and/or
[0772] (iv) innate lymphocytic cells (ILC).
   643. The AAV particle of any one of embodiments 1-605, or the pharmaceutical composition of embodiment 611 or 612, for use in the manufacture of a medicament.
   644. The AAV particle of any one of embodiments 1-605, or the pharmaceutical composition of embodiment 611 or 612, for use in the treatment of a disease associated with expression of HER2/neu or a cancer expressing HER2/neu.
   645. Use of the AAV particle of any one of embodiments 1-605, or the pharmaceutical composition of embodiment 611 or 612, in the manufacture of a medicament.
   646. Use of the AAV particle of any one of embodiments 1-605, or the pharmaceutical composition of embodiment 611 or 612, in the manufacture of a medicament for treating a disease associated with expression of HER2/neu or a cancer expressing HER2/neu.

### BRIEF DESCRIPTION OF THE DRAWINGS

[0773] FIGS. 1A-1C are graphical representation of the data from the codon optimization of the anti-HER2 monospecific vectorized antibody genetic elements. FIGS. 1A and 1B show the expression comparison of HER-53 (SEQ ID NO: 5168), HER-75 (SEQ ID NO: 5190) and HER-77 (non-optimized) in HEK expi293 cells (adherent) 3 days post-transfection (FIG. 1A), and in HEK expi293 cells (suspension) at 2, 3, and 7 days post-transfection (FIG. 1B). The antibody concentration (μg/mL) is displayed on the Y-axis, and the antibody is indicated on the X-axis. Points on the columns indicate individual transfections. FIG. 1C shows the results from the codon optimization of the anti-HER2 monospecific vectorized antibody genetic elements in assays using HEK-Blue human TLR9 (hTLR9) cells. The Y-axis shows the OD630 value from the cell-based reporter gene assay, a surrogate for TLR9 activation level, and the synthesized DNA oligos from the codon optimized antibody coding sequence and the oligos from the corresponding non-codon optimized sequence is indicated on the X-axis. The codon optimization resulted in reduced NF-kB response to the DNA sequences in hTLR9 HEK Blue cells.

[0774] FIGS. 2A-2D are graphical representations of the BT-474 cell proliferation assay of the vectorized anti-HER2 antibodies HER-04 (SEQ ID NO: 5163) (FIG. 2A), HER-05 (SEQ ID NO: 5170) (FIG. 2B), HER-10 (SEQ ID NO: 5164) (FIG. 2C), and HER-15 (SEQ ID NO: 5165) (FIG. 2D), expressed by Expi293 cells. The relative viability is shown on the Y-axis as percent of human IgG1 isotype control antibody signal, and the antibody concentration is shown on the X-axis in μg/mL. BT-474 cell proliferation was measured using the CellTiter-Glo 2.0 reagent after four days of antibody treatment. Error bars: mean and standard deviation from four replicates.

[0775] FIG. 3 is a graphical representation of the BT-474 cell proliferation assay comparing the HER-53 (SEQ ID NO: 5168), human IgG1 isotype control antibody, HER-04 (SEQ ID NO: 5163), and HER-10 (SEQ ID NO: 5164) vectorized anti-HER2 antibodies expressed by Expi293 cells. The relative viability is shown on the Y-axis as percent of human IgG1 isotype control antibody signal, and the antibody concentration is shown on the X-axis in μg/mL. Similar cell growth inhibition was observed between the HER-53 antibody with an enhanced Fc region and HER-04. HER-10 demonstrated increased growth inhibition compared to HER-53 or HER-04. BT-474 cell proliferation was measured using the CellTiter-Glo 2.0 reagent after four days of antibody treatment. Error bars: mean and standard deviation from four replicates.

[0776] FIGS. 4A-4D are graphical representations of the MDA-MB-361-luc cell proliferation assay comparing the HER-04 (SEQ ID NO: 5163) (FIG. 4A), HER-10 (SEQ ID NO: 5164) (FIG. 4C) and HER-15 (SEQ ID NO: 5165) (FIG. 4D) vectorized anti-HER2 antibodies expressed by Expi293 cells with a recombinant reference antibody control (Creative Biolabs cat. #TAB-761) (FIG. 4B). The relative viability is shown on the Y-axis as percent of human IgG1 isotype control antibody signal, and the antibody concentration is shown on the X-axis in μg/mL. The vectorized anti-HER2 antibodies inhibited cell growth of MDA-MB-361-luc cells in a dose-dependent manner. Cell proliferation was measured using the CellTiter-Glo 2.0 reagent after 13 days of antibody treatment. Error bars: mean and standard deviation from three replicates.

[0777] FIGS. 5A-5G are graphical representations of the MDA-MB-361-luc cell proliferation assay with an expanded dose range comparing the human IgG1 isotype control antibody (FIG. 5A), HER-04 (SEQ ID NO: 5163) (FIG. 5B), HER-10 (SEQ ID NO: 5164) (FIG. 5D), HER-15 (SEQ ID NO: 5165) (FIG. 5E), and HER-53 (SEQ ID NO: 5168) (FIGS. 5F-5G), vectorized anti-HER2 antibodies expressed by Expi293 cells with a recombinant reference (naked)antibody control (Creative Biolabs cat. #TAB-761) (FIG. 5C). The relative viability is shown on the Y-axis as percent of human IgG1 isotype control antibody signal, and the antibody concentration is shown on the X-axis in μg/mL. The vectorized anti-HER2 antibodies inhibited cell growth of MDA-MB-361-luc cells in a dose-dependent manner. Cell proliferation was measured using the CellTiter-Glo 2.0 reagent after 13 days of antibody treatment. Error bars: mean and standard deviation from three replicates.

[0778] FIGS. 6A-6B are graphical representations of the MDA-MB-361-luc cell proliferation assay, with an expanded dose range, comparing the recombinant reference antibody control (Creative Biolabs cat. #TAB-761) (FIG. 6A), and HER-10 (SEQ ID NO: 5164) (FIG. 6B) vectorized anti-HER2 antibody expressed by Expi293 cells. The relative viability is shown on the Y-axis as percent of human IgG1 isotype control antibody signal, and the antibody concentration is shown on the X-axis in μg/mL. Error bars: mean and standard deviation from three replicates. The vectorized HER-10 antibody inhibited cell growth of MDA-MB-361-luc cells in a dose-dependent manner. Cell proliferation was measured using the CellTiter-Glo 2.0 reagent after 13 days of antibody treatment. Error bars: mean and standard deviation from three replicates.

[0779] FIGS. 7A-7B are graphical representations of the ADCC activity of human IgG1 isotype control antibody, HER-04 (SEQ ID NO: 5163), and HER-10 (SEQ ID NO: 5164) expressed by Expi293 cells in comparison to a reference antibody employing the high affinity (FIG. 7A) and low affinity (FIG. 7B) variants of the human FcgRIIIa receptor. The fold induction (relative to no antibody control) is shown on the Y-axis, and the antibody concentration is shown on the X-axis in μg/mL. HER-10 contains enhancements in the Fc region that promote ADCC activity. HER-10 ADCC activity is similar a reference anti-HER2 antibody, and is improved over HER-04 in assays employing both the high affinity and low affinity variants of the FcgRIIIa receptor. Error bars: mean and standard deviation from three replicates.

[0780] FIGS. 8A-8B are graphical representations of the ADCC activity of HER-53 (SEQ ID NO: 5168) in comparison to HER-10 (SEQ ID NO: 5164) and HER-04 (SEQ ID NO: 5163) vectorized anti-HER2 antibodies expressed by Expi293 cells, employing the high affinity (FIG. 8A) and low affinity (FIG. 8B) variants of the human FcgRIIIa receptor. The fold induction (relative to no antibody control) is shown on the Y-axis, and the antibody concentration is shown on the X-axis in μg/mL. ADCC activity is similar between HER-53 and HER-10 while both display increased activity over HER-04 in assays employing both the high affinity and low affinity variants of the FcgRIIIa receptor. Error bars: mean and standard deviation from three replicates.

[0781] FIGS. 9A-9D are graphical representations of the BT-474 cell (FIGS. 9A and 9B) and SK-BR-3 cell (FIGS. 9C and 9D) proliferation assays with tucatinib and HER-53 (SEQ ID NO: 5168), HER-75 (SEQ ID NO: 5190), human IgG1 isotype control antibody, HER-04 (SEQ ID NO: 5163), and HER-10 (SEQ ID NO: 5164) vectorized anti-HER2 antibodies expressed by Expi293 cells. The relative viability is shown on the Y-axis as percent of human IgG1 isotype control antibody signal, and the antibody concentration is shown on the X-axis in μg/mL. Similar cell growth inhibition was observed between the HER-53 and HER-04. Tucatinib-treated cells served as positive control for cell growth inhibition. Cell proliferation was measured using the CellTiter-Glo 2.0 reagent after four days. Error bars: mean and standard deviation from four replicates (FIG. 9A, tucatinib only: two replicates).

[0782] FIGS. 10A-10B are graphical representations of the BT-474 cell proliferation assay of HER-43 (SEQ ID NO: 5185) in comparison to HER-47 (SEQ ID NO: 5167) vectorized anti-HER2 antibodies expressed by Expi293 cells (FIG. 10A), and HER-46 (SEQ ID NO: 5186) in comparison to HER-47 (SEQ ID NO: 5167) vectorized anti-HER2 antibodies expressed by Expi293 cells (FIG. 10B). The relative viability is shown on the Y-axis as percent of human IgG1 isotype control signal, and the antibody concentration is shown on the X-axis in μg/mL. Similar cell growth inhibition was observed between HER-04 and engineered antibodies containing mutations that abrogate FcRn-binding (HER-43, HER-46, and HER-47). BT-474 cell proliferation was measured using the CellTiter-Glo 2.0 reagent after four days of antibody treatment. Error bars: mean and standard deviation from four replicates.

[0783] FIG. 11 is a graphical representation of the SK-BR-3 cell proliferation assay of the vectorized anti-HER2 antibody HER-57 (SEQ ID NO: 5187) in comparison to HER-04 (SEQ ID NO: 5163), human IgG1 isotype control antibody, HER-10 (SEQ ID NO: 5164) (expressed by Expi293 cells) and tucatinih. The relative viability is shown on the Y-axis as percent of human IgG1 isotype control antibody signal, and the antibody concentration is shown on the X-axis in μg/mL. SK-BR-3 cells were sensitive to cell growth inhibition by the HER-57 vectorized antibody. Tucatinib-treated cells served as positive control for cell growth inhibition. SK-BR-3 cell proliferation was measured using the CellTiter-Glo 2.0 reagent after four days. Error bars: mean and standard deviation from four replicates (tucatinib only: two replicates).

[0784] FIGS. 12A-12B are graphical representations of the SK-BR-3 cell proliferation assay (FIG. 12A) and the BT-474 cell proliferation assay (FIG. 12B) of the vectorized anti-HER2 antibody HER-53 (SEQ ID NO: 5168) in comparison to HER-75 (SEQ ID NO: 5190), human IgG1 isotype control antibody, HER-88 (SEQ ID NO: 6500) and tucatinib. The relative viability is shown on the Y-axis as percent of human IgG1 isotype control antibody signal, and the antibody concentration is shown on the X-axis in μg/mL. Tucatinib-treated cells served as positive control for cell growth inhibition.

[0785] FIGS. 13A-13C are images of mouse brain immunohistochemical staining depicting the tissue transduction distributions after IV administration of AAV vectors (4.0E11 vector genomes per mouse) carrying a CBA-promoter driven EGFP transgene in Fox Chase SCID CB17 mice (Charles River Labs, #236). After perfusion of animals, brains were dissected and then fixed in 10% Neutral Buffered Formalin. The fixed brain tissues were then paraffin embedded, sectioned, and stained with anti-EGFP and anti-human nucleoli antibodies. Immunohistochemistry (IHC) was performed with a chromogenic dye that correlated with the level of EGFP protein present in the tissue. IHC results are displayed on both ipsilateral (left side of diagram) and contralateral (right side of diagram) sagittal section in order of increasing brain distribution, where FIG. 13A is the VOY101 capsid, FIG. 13B is the VOY9P33 capsid. Tumor distinguished by human nucleoli staining is demarcated by black oval. FIG. 13C is the VOY9P39 capsid. Representative images are displayed for n=5 per cohort (AAV type). Scale bar indicates relative size in millimeters.

[0786] FIGS. 14A-14D are graphical representations of the mouse pharmacokinetics and pharmacodynamics of antibody expressed from IV administration of the HER10 construct, vectorized in the VOY9P39 capsid. Antibody concentration in mouse serum (FIG. 14A), CSF (FIG. 14B), and brain tissue (FIGS. 14C and 14D) after IV administration of AAV in Fox Chase SCID CB17 (Charles River Labs, #236). Human IgG1 was measured by an AlphaLISA assay. FIGS. 14A-14D X-axis indicates the days post treatment. In FIG. 14A the mean serum levels of human IgG1 (ug/ml) indicates increasing levels with time since injection of the AAV. In FIG. 14B the mean CSF levels remain constant (n=3 mice/cohort). In FIG. 14C, the mean brain levels also increase with time since AAV injection. In FIGS. 14A and 14B the Y-axis shows the concentration of hIgG1 (ug/ml), and in FIG. 14C the concentration of the hIgG1 is shown as a percent of total protein. In FIG. 14D, the number of viral vector genomes (VG) per diploid cell as measured by droplet digital PCR (ddPCR) indicates a decrease in mean VG with time since injection. In FIG. 14D the Y-axis depicts the number of viral vector genomes per diploid cell. The +/− standard error of the mean are depicted by whiskers in all panels.

[0787] FIGS. 15A-15D are graphical representation of the data from the prophylactic treatment of vectorized HER10. Prophylactic treatment 12 days prior to xenograft with IV administration of AAV particles (5.0E11 vector genomes per mouse) comprising a VOY9P39 capsid and either a genetic element comprising the HER-10 sequence (SEQ ID NO: 5164) (5.0E11 VG/mouse) or a sequence encoding an human IgG1 isotype control antibody to Fox Chase SCID CB17 mice (Charles River Labs, #236). FIG. 15A is a graph of mean bioluminescent imaging data (BLI) with photons/second displayed (Total Flux). Statistically significant reductions in tumor burden after HER10 treatment are denoted by stars, based on discovery determined using the two-stage linear step-up procedure of Benjamini, Krieger and Yekutieli, with Q=5% (Benjamini, Y., Krieger, A. M., & Yekutieli, D., 2006, Biometrika. 93, 491-507). Each row was analyzed individually, without assuming a consistent SD. Number of t tests: 3. Q values are adjusted for multiple comparison. Days 17; q=0.014, Day 24; q=0.031, Day 28; q=0.016 (n=10 mice/cohort). FIG. 15B shows plots of the mean values of IgG1 quantification at day 30 post xenograft from serum (ug/ml, P<0.001) and FIG. 15C is a plot of human IgG concentrations in the brain homogenate from mice, 30 days after xenotransplantation of MDA-MB-361-Luc tumor cells in the brain (% total protein, P<0.004). FIG. 15D is a plot of the mean values for vector genomes per diploid cell by group as measured from brain tissue homogenates by ddPCR quantification at day 30 post xenotransplantation of tumor cells. The +/− standard error of the mean are depicted by whiskers in all panels.

[0788] FIGS. 16A-16E are graphical representations of data generated from studies of Fox Chase SCID CB17 (Charles River Labs, #236) mice that underwent vectorized antibody treatment following tumor xenograft. Mice were xenotransplanted in the brain with MDA-MB-361-luc tumor cells 2 days prior to IV treatment (2.5e11 vector genomes per mouse). After allowing the engraftment of tumors for 2 days, mice were administered a genetic element comprising the HER-10 (FIGS. 16A-16C) or HER-53 (FIG. 16D-16E) sequence vectorized in a VOY9P39 capsid or a genetic element encoding a human IgG1 isotype control antibody vectorized in a VOY9P39 capsid. FIGS. 16A and 16D are graphs of the mean bioluminescent imaging data (BLI) for mice from each treatment group, with photons/second normalized to day 7 baseline reading. Statistically significant reductions in tumor burden after HER-10 and HER-53 treatment are denoted by stars, based on discovery determined using the two-stage linear step-up procedure of Benjamini, Krieger and Yekutieli, with Q=5% (Benjamini, Y., Krieger, A. M., & Yekutieli, D., 2006, Biometrika. 93, 491-507). Each row was analyzed individually, without assuming a consistent SD. FIG. 16A: number of t tests: 7; Q values are adjusted for multiple comparison; Days 21 & 28: q=0.001, Day 35; q=0.0015, Day 44; q=0.026, Day 49; q=0.0064 (n=5 mice/cohort). FIG. 16B is a plot of IgG1 concentrations in mouse serum as quantified by AlphaLISA at day 43 (q<0.0012. t-test), 63 (q=0.0019) and 99 (q=0.029) post AAV administration. Multiple t-tests, FDR(q) values reported. The +/− standard error of the mean are depicted by whiskers in all panels. FIGS. 16C and 16E are plots of the Kaplan-Meier curves depicting significant survival difference (P=0.0035; Log-rank (Mantel-Cox test) between HER-10 (FIG. 16C), HER-53 (FIG. 16E) and a human IgG1 isotype control antibody transduced mouse.

[0789] FIGS. 17A-17B are graphical representations of the data from the intracranial treatment of tumor xenografted mice with HER-10 (SEQ ID NO: 5164) or isotype control antibody vectorized in a VOY-101 capsid (6.0E10 vector genomes per mouse). FIG. 17A is a plot of the mean bioluminescent imaging data (BLI) for AAV treatment at Day 2 post xenograft, with photons/second normalized to day 7 baseline reading. FIG. 17B is a plot of the Kaplan-Meier curves depicting a survival difference between HER-10 and a human IgG1 isotype control antibody transduced mouse. HER-10 demonstrates persistent and significant tumor growth suppression as compared to vectorized human IgG1 isotype control treated CB17/SCID mice. Statistically significant reductions in tumor burden after HER-10 treatment are evident at indicated time points, based on discovery determined using multiple t-tests comparing human IgG1 isotype control vs HER-10. Each row was analyzed individually, without assuming a consistent SD. +/− standard error of the mean are depicted by whiskers in all panels.

[0790] FIG. 18 is an image of the immunohistochemical staining of anti mouse Cd11b (black) of MDA-MB-361 orthotopic xenografts in a mouse brain. The monocytes aggregate around the tumor periphery and infiltrate within the human tumor mass at 28 days post AAV9P39 treatment.

[0791] FIGS. 19A-19D are graphical representations of the cell proliferation assays of the vectorized anti-HER2 bispecific antibody HER-73 (SEQ ID NO: 5189) and HER-78 (SEQ ID NO: 5375) in comparison to human IgG1 isotype control antibody, HER-10 (SEQ ID NO: 5164) (expressed by Expi293 cells), ZW-25, and tucatinib in BT-474 cells (FIGS. 19A and 19C) and SK-BR-3 cells (FIGS. 19B and 19D). The relative viability is shown on the Y-axis as percent of human IgG1 isotype control antibody signal, and the antibody concentration is shown on the X-axis in μg/mL. The HER-73 and HER-78 antibodies demonstrated an increased cell growth inhibition of BT-474 cells in comparison to HER-10 or the ZW-25 bispecific antibody. Tucatinib-treated cells served as positive control for cell growth inhibition. BT-474 cell proliferation was measured using the CellTiter-Glo 2.0 reagent after four days. Similar to BT-474 cells, SK-BR-3 cells were sensitive to HER-73 and HER-78. Tucatinib-treated cells served as positive control for cell growth inhibition. SK-BR-3 cell proliferation was measured using the CellTiter-Glo 2.0 reagent after four days. Error bars: mean and standard deviation from four replicates (tucatinib only: two replicates).

[0792] FIG. 20A shows tumor burden as measured by total flux (photons/second) treated intravenously with AAV_TTM-002.HER-75 or AAV_TTM-002.Control particles over the days post xenograft (MDA-MB-361L cells) (n=5 mice per group, and p-values as measured by a 2 Way Anova Sidak's multiple comparison test). FIG. 20B shows the quantification of vectorized HER-75 antibodies or the isotype control (hIgG1 (μg/mL)) by alphaLISA in the CSF following treatment intravenous treatment with AAV_TTM-002.HER-75 or AAV_TTM-002.Control particles at day 53 post xenograft.

[0793] FIG. 20C provides the vector genome copies per diploid cell as measured by ddPCR in the brain following treatment intravenous treatment with AAV_TTM-002.HER-75 or AAV_TTM-002.Control particles at day 53 post xenograft. In FIGS. 20A-20C, the AAV particles were administered prophylactically to the mice 10 days prior to injection of the xenograft.

[0794] FIG. 21A shows tumor burden as measured by total flux (photons/second) treated intravenously with AAV_TTM-002.HER-75 or AAV_TTM-002.Control particles over the days post xenograft (MDA-MB-361L cells) (n=5 mice per group, and p-values as measured by a Dunnett's Multiple comparison test, 2 Way ANOVA) at the indicated doses. FIG. 21B shows the quantification of vectorized HER-103 antibodies or the isotype control (hIgG1 (μg/mL)) by alphaLISA in the serum following treatment intravenous treatment with AAV_TTM-002.HER-103 or AAV_TTM-002.Control particles at day 28 post treatment.

### DETAILED DESCRIPTION

[0795] Described herein, inter alia, are compositions comprising isolated, e.g., recombinant, viral particles, e.g., AAV particles, for delivery, e.g., vectorized delivery, of an antibody molecule and methods of making and using the same. In some embodiments, the antibody molecule is an antibody molecule that binds to HER2, e.g., an anti-HER2 antibody molecule described herein. Generally, the recombinant AAV particles will include a genetic element comprising a nucleotide sequence, e.g., encoding a transgene encoding an antibody molecule that binds to HER2.

[0796] Antibodies typically have short half-lives, presenting a challenge for antibody-based therapies. To achieve a sufficiently high concentration of an antibody for long lasting therapeutic effects, said antibody-based therapies are traditionally delivered by repeated administration, e.g. by multiple injections. These repeated dosing regimens can result in inconsistent levels of antibody throughout the treatment period, limited efficiency per administration, high cost of administration and consumption of the antibody. Hence, there is a need for improved methods of delivering antibodies and antibody-based therapeutics that increase duration and efficacy of the response and result in sustained, high levels of the therapeutic antibody.

[0797] Additionally, treatment modalities for brain and CNS diseases (e.g., HER2-positive metastatic cancer) are extremely limited due to the impermeability of the brain's blood vessels to most substances carried in the blood stream. The blood vessels of the brain, referred to collectively as the blood-brain barrier (BBB), are unique when compared to the blood vessels found in the periphery of the body. Tight apposition of BBB endothelial cells (EC) to neural cells like astrocytes, pericytes and neurons induces phenotypic features that contribute to the observed impermeability. Tight junctions between ECs comprising the BBB limit paracellular transport, while the lack of pinocytotic vesicles and fenestrae limit non-specific transcellular transport. These factors combine to restrict molecular flux from the blood to the brain to those molecules that are less than 500 daltons and also lipophilic. Thus, using the large mass transfer surface area of the bloodstream as a delivery vehicle is largely infeasible except in those circumstances where a drug with the desired pharmacological properties fortuitously possesses the size and lipophilicity attributes allowing it to pass freely through the blood vessel. Because of such restrictions, it has been estimated that greater than 98% of all small molecule pharmaceuticals and nearly 100% of the emerging class of protein (e.g., antibodies) and gene therapeutics do not cross the BBB.

[0798] Adeno-associated viral (AAV) vectors and particles are commonly used in gene therapy approaches as a result of a number of advantageous features. AAVs are typically non-replicating in infected cells, and therefore are generally not associated with disease. Further, AAVs may be introduced to a variety of host cells, do not integrate into the genome of the host cell, and are capable of infecting both quiescent and dividing cells. AAVs transduce non-replicating and long-lived cells in vivo, resulting in long term expression of the protein of interest. Further, AAVs can be manipulated with cellular and molecular biology techniques to produce non-toxic, isolated, recombinant, AAV particles comprising a payload that can be delivered to a target tissue or set of cells with limited or no side-effects. Without wishing to be bound by theory, it is believed in some embodiments, that expression vectors, e.g., an adeno-associated viral vector (AAVs) or AAV particle, e.g., an AAV particle described herein, can be used to administer and/or deliver antibody molecules, e.g., antibodies that bind to HER2, in order to achieve sustained, high concentrations, allowing for longer lasting efficacy, fewer dose treatments, and/or more consistent levels of the antibody throughout the treatment period.

[0799] Using a vectorized antibody delivery (VAD) approach of an anti-HER2 antibody described herein, an AAV particle is used as the delivery modality for a nucleotide sequence, e.g., an AAV vector, genetic element, or nucleic acid described herein, encoding a transgene encoding the anti-HER2 antibody molecule. In some embodiments, vectorized delivery of a functional anti-HER2 antibody molecule described herein, results in in vivo expression of the encoded antibody. In some embodiments, upon delivery of an AAV particle comprising genetic element comprising a nucleotide sequence encoding a transgene encoding an antibody molecule, the AAV particle enters the cell via endocytosis and is transported to the nucleus wherein the genetic element is released and converted into a double-stranded episomal molecule of DNA by the host cell. In some embodiments, the transcriptionally active episome results in the expression of encoded anti-HER2 antibodies (e.g., an anti-HER2 antibody molecule described herein) that is then secreted from the cell into the circulation.

[0800] Without wishing to be bound by theory, it is believed in some embodiments, that the use of an AAV particle or plurality of AAV particles for the vectorized delivery of an antibody molecule that binds to HER2 (e.g. an anti-HER2 antibody described herein) would lead to increased exposure in the central nervous system (CNS), and one-time administration would result in long-term, robust expression of anti-HER2 antibodies in the subject, e.g., a subject having or diagnosed with having a disease associated with over expression of HER2 (e.g., HER2+ metastatic cancer).

[0801] Without wishing to be bound by theory, it believed in some embodiments, that HER2+ tumors manifesting in the CNS exhibit sub-therapeutic thresholds of anti-HER2 antibody concentrations. In some embodiments, this sub-therapeutic thresholds of anti-HER2 antibody concentrations can result from blood-brain barrier that limits the entry of large biomolecules (e.g., antibodies) into the CNS. Additionally, rapid efflux of antibodies out of the CNS, has also been observed, e.g., by the HER2+ mouse brain xenograft studies with passive administration doses of trastuzumab that far exceed the clinical levels in addition to clinical trials of high-dose Trastuzumab+Pertuzumab combinations (Lin et al., Journal of Clinical Oncology 39(24): (2021)).

[0802] Without wishing to be bound by theory, it is believed that the anti-HER2 vectorized antibodies of the present disclosure generate durable expression of HER2-directed antibodies by both “factory” cells in the CNS (neurons, astrocytes, glial cells) in addition to the metastatic tumors that have infiltrated the CNS. In some embodiments, these cells transduced with AAV transgenes secrete antibody into the brain parenchyma, ISF, CSF, and tumor micro-environment. Without wishing to be bound by theory, it is believed in some embodiments, that this this can result in high levels of target engagement on HER2 amplified tumors leading to both disruption of aberrant HER-family receptor signaling and tumor killing by ADCC. In some embodiments, an AAV particle described herein encoding an anti-HER2 antibody molecule described herein may be administered through intravenous (IV), intra cisterna magna injection (ICM), and direct intra-tumoral injections. In some embodiments, each of the aforesaid routes of administration can complement the existing standard of care.

[0803] Also contemplated herein, inter alia, are compositions comprising an AAV capsid polypeptide, e.g., an AAV capsid variant, e.g., an AAV capsid variant described herein for delivery, e.g., vectorized delivery, of an anti-HER antibody molecule described herein, and methods of making and using the same. Generally, the AAV capsid variant has enhanced tropism for a cell or tissue, e.g., for the delivery of a payload to said cell or tissue, for example a CNS tissue or a CNS cell.

[0804] As demonstrated in the Examples herein below, certain AAV capsid variants described herein show multiple advantages over wild-type AAV9, including (i) increased penetrance through the blood brain barrier following intravenous administration, (ii) wider distribution throughout the multiple brain regions, e.g., frontal cortex, sensory cortex, motor cortex, putamen, thalamus, cerebellar cortex, dentate nucleus, caudate, and/or hippocampus, and/or (iii) elevated payload expression in multiple brain regions. Without wishing to be being bound by theory, it is believed that these advantages may be due, in part, to the dissemination of the AAV capsid variants through the brain vasculature. In some embodiments, the AAV capsids described herein enhance the delivery of a payload, e.g., an anti-HER-2 antibody molecule described herein, to multiple regions of the brain including for example, the frontal cortex, sensory cortex, motor cortex, putamen, midbrain thalamus, cerebellar cortex, dentate nucleus, caudate, and/or hippocampus. In some embodiments, the AAV capsids described herein enhance the expression of a payload, e.g., an anti-HER-2 antibody molecule described herein or mRNA encoding an anti-HER2 antibody molecule, to multiple cell types in the CNS, e.g., neurons and/or non-neuronal cells (e.g., oligodendrocytes, astrocytes, and/or glial cells). Without wishing to be bound by theory, an AAV particle comprising an AAV capsid polypeptide, e.g., an AAV capsid variant described herein, for the vectorized delivery of an antibody molecule that binds to HER2/neu described here will result in increased penetrance through the blood brain barrier and transduction in non-neuronal cells (e.g., glial cells, e.g., astrocytes and oligodendrocytes), e.g., following intravenous administration, and/or increased biodistribution of the antibody molecule that binds to HER2/neu in the central nervous system, e.g., the brain and the spinal cord. In some embodiments, an AAV capsid variant disclosed herein comprises a modification in loop IV of AAV9, e.g., at positions between 449-460, e.g., at position 454 and/or 455, numbered relative to SEQ ID NO: 138, 981, or 982. In some embodiments, loop (e.g., loop IV) is used interchangeably herein with the term variable region (e.g., variable region IV), or VR (e.g., VR-TV). In some embodiments loop IV comprises positions 449-475 (e.g., amino acids KTINGSGQNQQTLKFSVAGPSNMAVQG (SEQ ID NO: 7583)), numbered according to SEQ ID NO: 138. In some embodiments loop IV comprises positions 449-460 (e.g., amino acids KTINGSGQNQQT (SEQ ID NO: 7584)), numbered according to SEQ ID NO: 138. In some embodiments, loop IV or variable region IV (VR-IV) is as described in DiMattia et al. “Structural Insights into the Unique Properties of the Adeno-Associated Virus Serotype 9,” Journal of Virology, 12(86):6947-6958 (the contents of which are hereby incorporated by reference in their entirety), e.g., comprising positions 452-460 (e.g., NGSGQNQQT (SEQ ID NO: 7585)), numbered according to SEQ ID NO: 138.

### I. DEFINITIONS

[0805] Unless defined otherwise, all technical and scientific terms used herein have the same meaning as commonly understood by one of ordinary skill in the art to which the invention pertains.

[0806] Throughout this disclosure, various embodiments of the invention can be presented in a range format. It should be understood that the description in range format is merely for convenience and brevity and should not be construed as an inflexible limitation on the scope of the invention. Accordingly, the description of a range should be considered to have specifically disclosed all the possible subranges as well as individual numerical values within that range. For example, description of a range such as from 1 to 6 should be considered to have specifically disclosed subranges such as from 1 to 3, from 1 to 4, from 1 to 5, from 2 to 4, from 2 to 6, from 3 to 6 etc., as well as individual numbers within that range, for example, 1, 2, 2.7, 3, 4, 5, 5.3, and 6. As another example, a range such as 95-99% identity, includes something with 95%, 96%, 97%, 98%, or 99% identity, and includes subranges such as 96-99%, 96-98%, 96-97%, 97-99%, 97-98%, and 98-99% identity. This applies regardless of the breadth of the range.

[0807] The term “a” and “an” refers to one or to more than one (i.e., to at least one) of the grammatical object of the article. By way of example, “an element” means one element or more than one element.

[0808] The term “or” is used herein to mean, and is used interchangeably with the term “and/or”, unless context clearly indicates otherwise.

[0809] As used herein, the term “about” or “approximately” when referring to a measurable value such as an amount, a temporal duration, and the like, are meant to encompass variations of ±20% or in some instances ±10%, or in some instances ±5%, or in some instances ±1%, or in some instances ±0.1% from the specified value, as such variations are appropriate to perform the disclosed methods.

[0810] The term “AAV particle” or “AAV viral particle” refers to a particle or a virion comprising an AAV capsid, e.g., an AAV capsid variant, and a polynucleotide, e.g., a genetic element and/or a vector. In some embodiments, the genetic element of the AAV particle comprises at least one payload and at least one ITR region. In some embodiments, the AAV particle is capable of delivering a transgene encoding a payload to cells, typically, mammalian, e.g., human, cells. In some embodiments, the AAV particle may be produced recombinantly. In some embodiments, an AAV particle described herein may be derived from any serotype, described herein or known in the art, including combinations of serotypes (e.g., “pseudotyped” AAV) or from various genomes (e.g., single stranded or self-complementary). In some embodiments, the AAV particle may be replication defective and/or targeted.

[0811] As used herein, the term “capsid” refers to the exterior, e.g., a protein shell, of a virus particle, e.g., an AAV particle, that is substantially (e.g., >50%, >>90%, or 100%) protein. In some embodiments, the capsid is an AAV capsid comprising an AAV capsid protein described herein, e.g., a VP1, VP2, and/or VP3 polypeptide. The AAV capsid protein can be a wild-type AAV capsid protein or a variant, e.g., a structural and/or functional variant from a wild-type or a reference capsid protein, referred to herein as an “AAV capsid variant.” In some embodiments, the AAV capsid variant described herein has the ability to enclose, e.g., encapsulate, a viral genome and/or is capable of entry into a cell, e.g., a mammalian cell. In some embodiments, the AAV capsid variant described herein may have modified tropism compared to that of a wild-type AAV capsid, e.g., the corresponding wild-type capsid.

[0812] As used herein, the term “genetic element” refers to a nucleic acid sequence, generally in a particle, e.g., an AAV particle. The genetic element can be produced as naked DNA and optionally further assembled into a capsid. A particle, e.g., an AAV particle can insert its genetic element into a cell. For example, a payload of a genetic element described herein can be a polypeptide or a polynucleotide. In some embodiments, the genetic element comprises at least one inverted terminal repeat (ITR) and at least one payload. In some embodiments, the genetic element comprises a polynucleotide sequence encoding a payload flanked on one side by an ITR. In some embodiments, the genetic element comprises a polynucleotide sequence encoding a payload flanked on both sides by an ITR.

[0813] As used herein, a “viral genome” or “vector genome” is a polynucleotide comprising the genetic element. In some embodiments, the genetic element comprises at least one inverted terminal repeat (ITR) and at least one transgene encoding a payload, e.g., a payload region.

[0814] As used herein, a “transgene encoding a payload” or a “payload region” refers to a polynucleotide or polynucleotide region, e.g., within a viral genome, e.g., a genetic element, which encodes an expression product, e.g., a payload. In some embodiments, the payload is, or comprises, a polypeptide, e.g., an antibody molecule. In some embodiments, the payload comprises a transgene, a polynucleotide encoding a polypeptide or multi-polypeptide, e.g., antibody molecule, or a modulatory nucleic acid or regulatory nucleic acid.

[0815] As used herein, a “vector” is any molecule or moiety which transports, transduces or otherwise acts as a carrier of a heterologous molecule. In some embodiments, vectors may be plasmids. Vectors of the present disclosure may be produced recombinantly. The heterologous molecule may be a polynucleotide and/or a polypeptide.

[0816] As used herein, the term “administered in combination” or “combined administration” means that two (or more) agents are delivered to a subject during the course of the subject's affliction with the disorder, for example, the two or more treatments are delivered after the subject has been diagnosed with the disorder and before the disorder has been cured or eliminated or treatment has ceased for other reasons. In some embodiments, the delivery of one treatment is still occurring when the delivery of the second begins, so that there is overlap in terms of administration. This is sometimes referred to herein as “simultaneous” or “concurrent delivery”. In other embodiments, the delivery of one treatment ends before the delivery of the other treatment begins. In some embodiments of either case, the treatment is more effective because of combined administration. For example, the second treatment is more effective, for example, an equivalent effect is seen with less of the second treatment, or the second treatment reduces symptoms to a greater extent, than would be seen if the second treatment were administered in the absence of the first treatment, or the analogous situation is seen with the first treatment. In some embodiments, delivery is such that the reduction in a symptom, or other parameter related to the disorder is greater than what would be observed with one treatment delivered in the absence of the other. The effect of the two treatments can be partially additive, wholly additive, or greater than additive. The delivery can be such that an effect of the first treatment delivered is still detectable when the second is delivered.

[0817] As used herein, the term “amelioration” or “ameliorating” refers to a decreasing, e.g., lessening, of the severity of at least one indicator or parameter of a condition or disease. In some embodiments, amelioration of an indicator of a condition or disease in a subject results from treating the subject with a treatment described herein, as compared to a second subject that has not received the treatment. In some embodiments, the indicator or parameter of a condition or disease comprises a sign and/or symptom of the disorder. For example, in the context of neurodegeneration disorder, amelioration includes the reduction of neuron loss.

[0818] As used herein, the term “antibody” or “antibody molecule” refers to a protein comprising at least one immunoglobulin variable domain sequence. Antibodies, for example, can be polyclonal or monoclonal, multiple or single chain, or intact immunoglobulins, and may be derived from natural sources or from recombinant sources. Antibodies can be tetramers of immunoglobulin molecules. In some embodiments, an antibody molecule comprises a full-length antibody, or a full-length immunoglobulin chain. In some embodiments, an antibody molecule comprises an antigen binding or functional fragment of a full-length antibody, or a full-length immunoglobulin chain. In some embodiments, the term antibody includes functional fragments thereof. In some embodiments, constant regions of the antibodies can be altered, e.g., mutated, to modify the properties of the antibody (e.g., to increase or decrease one or more of: Fc receptor binding, antibody glycosylation, the number of cysteine residues, effector cell function, or complement function).

[0819] As used herein, the term “antibody fragment” refers to at least one portion of an intact antibody, or recombinant variants thereof, and refers to the antigen binding domain, for example, an antigenic determining variable region of an intact antibody, that is sufficient to confer recognition and specific binding of the antibody fragment to a target, such as an antigen. Examples of antibody fragments include, but are not limited to, Fab, Fab′, F(ab′)2, and Fv fragments, scFv antibody fragments, linear antibodies, single domain antibodies such as sdAb (either VL or VH), camelid VHH domains, and multi-specific molecules formed from antibody fragments such as a bivalent fragment comprising two or more, for example, two, Fab fragments linked by a disulfide bridge at the hinge region, or two or more, for example, two isolated CDR or other epitope binding fragments of an antibody linked. An antibody fragment can also be incorporated into single domain antibodies, maxibodies, minibodies, nanobodies, intrabodies, diabodies, triabodies, tetrabodies, v-NAR and bis-scFv (see, for example, Hollinger and Hudson, Nature Biotechnology 23:1126-1136, 2005). Antibody fragments can also be grafted into scaffolds based on polypeptides such as a fibronectin type III (Fn3) (see U.S. Pat. No. 6,703,199, which describes fibronectin polypeptide minibodies).

[0820] The terms “complementarity determining region” or “CDR,” as used herein, refer to the sequences of amino acids within antibody variable regions which confer antigen specificity and binding affinity. For example, in general, there are three CDRs in each heavy chain variable region (for example, HCDR1, HCDR2, and HCDR3) and three CDRs in each light chain variable region (LCDR1, LCDR2, and LCDR3). The precise amino acid sequence boundaries of a given CDR can be determined using any of a number of well-known schemes, including those described by Kabat et al. (1991), “Sequences of Proteins of Immunological Interest,” 5th Ed. Public Health Service, National Institutes of Health, Bethesda, MD (“Kabat” numbering scheme), Al-Lazikani et al., (1997) JMB 273, 927-948 (“Chothia” numbering scheme), or a combination thereof. In a combined Kabat and Chothia numbering scheme, in some embodiments, the CDRs correspond to the amino acid residues that are part of a Kabat CDR, a Chothia CDR, or both.

[0821] The term “scFv” refers to a fusion protein comprising at least one antibody fragment comprising a variable region of a light chain and at least one antibody fragment comprising a variable region of a heavy chain, wherein the light and heavy chain variable regions are contiguously linked via a short flexible polypeptide linker, and capable of being expressed as a single chain polypeptide, and wherein the scFv retains the specificity of the intact antibody from which it is derived. Unless specified, as used herein an scFv may have the VL and VH variable regions in either order, for example, with respect to the N-terminal and C-terminal ends of the polypeptide, the scFv may comprise VL-linker-VH or may comprise VH-linker-VL. In some embodiments, the scFv may comprise the structure of NH2-VL-linker-VH-COOH or NH2-VH-linker-VL-COOH.

[0822] As used herein, an “immunoglobulin variable domain sequence” or “variable domain” refers to an amino acid sequence which can form the structure of an immunoglobulin variable domain. For example, the sequence may include all or part of the amino acid sequence of a naturally-occurring variable domain. For example, the sequence may or may not include one, two, or more N- or C-terminal amino acids, or may include other alterations that are compatible with formation of the protein structure.

[0823] The term “antigen-binding site” refers to the part of an antibody molecule that comprises determinants that form an interface that binds to a polypeptide, or an epitope thereof. With respect to proteins (or protein mimetics), the antigen-binding site typically includes one or more loops (of at least, e.g., four amino acids or amino acid mimics) that form an interface that binds to a polypeptide. Typically, the antigen-binding site of an antibody molecule includes at least one or two CDRs and/or hypervariable loops, or more typically at least three, four, five or six CDRs and/or hypervariable loops.

[0824] As used herein, the term “epitope” refers to the moieties of an antigen that specifically interact with an antibody molecule. Such moieties, also referred to herein as epitopic determinants, typically comprise, or are part of, elements such as amino acid side chains or sugar side chains. An epitopic determinant can be defined by methods known in the art or disclosed herein, e.g., by crystallography or by hydrogen-deuterium exchange. At least one or some of the moieties on the antibody molecule that specifically interact with an epitopic determinant are typically located in a CDR(s). Typically, an epitope has a specific three dimensional structural characteristics. Typically, an epitope has specific charge characteristics. Some epitopes are linear epitopes while others are conformational epitopes.

[0825] The term “antibody heavy chain,” or “heavy chain” refers to the larger of the two types of polypeptide chains present in antibody molecules in their naturally occurring conformations, and which normally determines the class to which the antibody belongs.

[0826] The term “antibody light chain,” or “light chain” refers to the smaller of the two types of polypeptide chains present in antibody molecules in their naturally occurring conformations. Kappa (κ) and lambda (λ) light chains refer to the two major antibody light chain isotypes.

[0827] As used herein, the terms “multibody” or “multispecific antibody” refer to an antibody comprising a plurality of immunoglobulin variable domain sequences, wherein a first immunoglobulin variable domain sequence of the plurality has binding specificity for a first epitope and a second immunoglobulin variable domain sequence of the plurality has binding specificity for a second epitope. In some embodiments, the first and second epitopes are on the same antigen, e.g., the same protein (or subunit of a multimeric protein). In some embodiments, the first and second epitopes overlap or substantially overlap. In some embodiments, the first and second epitopes do not overlap or do not substantially overlap. In some embodiments, the first and second epitopes are on different antigens, e.g., different proteins (or different subunits of a multimeric protein). In some embodiments, a multispecific antibody molecule comprises a third, fourth or fifth immunoglobulin variable domain. In some embodiments, a multispecific antibody molecule is a bispecific antibody molecule, a trispecific antibody molecule, or tetraspecific antibody molecule.

[0828] As used herein, the term “bispecific antibody” refers to an antibody that has specificity for no more than two antigens. A bispecific antibody molecule is characterized by a first immunoglobulin variable domain sequence which has binding specificity for a first epitope and a second immunoglobulin variable domain sequence that has binding specificity for a second epitope. In some embodiments, the first and second epitopes are on the same antigen, e.g., the same protein (or subunit of a multimeric protein). In some embodiments, the first and second epitopes overlap or substantially overlap. In some embodiments, the first and second epitopes do not overlap or do not substantially overlap (e.g., a biparatopic antibody). In some embodiments, the first and second epitopes are on different antigens, e.g., different proteins (or different subunits of a multimeric protein). In some embodiments, a bispecific antibody is able to bind two different antigens simultaneously or sequentially. Methods for making bispecific antibodies are well known in the art. Various formats for combining two antibodies are also known in the art. Forms of bispecific antibodies of the invention include, but are not limited to, a diabody, a single-chain diabody, Fab dimerization (Fab-Fab), Fab-scFv, and a tandem antibody, as known to those of skill in the art.

[0829] The terms “monoclonal antibody” or “monoclonal antibody composition” as used herein refer to a preparation of antibody molecules of single molecular composition. A monoclonal antibody composition displays a single binding specificity and affinity for a particular epitope. A monoclonal antibody can be made by hybridoma technology or by methods that do not use hybridoma technology (e.g., recombinant methods). “Humanized” forms of non-human (for example, murine) antibodies are chimeric immunoglobulins, immunoglobulin chains or fragments thereof (such as Fv. Fab, Fab′, F(ab′)2 or other antigen-binding subsequences of antibodies) which contain minimal sequence derived from non-human immunoglobulin. For the most part, humanized antibodies and antibody fragments thereof are human immunoglobulins (recipient antibody or antibody fragment) in which residues from a complementary-determining region (CDR) of the recipient are replaced by residues from a CDR of a non-human species (donor antibody) such as mouse, rat or rabbit having the desired specificity, affinity, and capacity. In some instances, Fv framework region (FR) residues of the human immunoglobulin are replaced by corresponding non-human residues. Furthermore, a humanized antibody/antibody fragment can comprise residues which are found neither in the recipient antibody nor in the imported CDR or framework sequences. These modifications can further refine and optimize antibody or antibody fragment performance. In general, the humanized antibody or antibody fragment thereof will comprise substantially all of at least one, and typically two, variable domains, in which all or substantially all of the CDR regions correspond to those of a non-human immunoglobulin and all or a significant portion of the FR regions are those of a human immunoglobulin sequence. The humanized antibody or antibody fragment can also comprise at least a portion of an immunoglobulin constant region (Fc), typically that of a human immunoglobulin. For further details, see Jones et al., Nature, 321: 522-525, 1986; Reichmann et al., Nature, 332: 323-329, 1988; Presta, Curr. Op. Struct. Biol., 2: 593-596, 1992.

[0830] “Fully human” as used herein refers to an immunoglobulin, such as an antibody or antibody fragment, where the whole molecule is of human origin or consists of an amino acid sequence identical to a human form of the antibody or immunoglobulin.

[0831] The term “Chimeric Antigen Receptor” or alternatively a “CAR” refers to a recombinant polypeptide construct comprising at least an extracellular antigen binding domain, a transmembrane domain and a cytoplasmic signaling domain (also referred to herein as “an intracellular signaling domain”) comprising a functional signaling domain derived from a stimulatory molecule. In some embodiments, the domains in the CAR polypeptide construct are in the same polypeptide chain, for example, comprise a chimeric fusion protein. In some embodiments, the domains in the CAR polypeptide construct are not contiguous with each other, for example, are in different polypeptide chains.

[0832] As used herein, the terms “associated with,” “conjugated,” “linked,” “attached,” “coupled,” and “tethered,” when used with respect to two or more moieties, means that the moieties are associated or connected, e.g., physically or chemically, with one another, either directly or via one or more additional moieties that serves as a linking agent, to form a structure that is sufficiently stable so that the moieties remain physically associated under the conditions in which the structure is used, e.g., physiological conditions. In some embodiments, the two or more moieties are covalently or non-covalently linked, coupled, or attached. In some embodiments, an association is through direct covalent chemical bonding. In other embodiments, the association is through ionic or hydrogen bonding or a hybridization based connectivity sufficiently stable such that the associated or linked entities remain physically associated.

[0833] As used herein, the term “complementary” when used to describe a first nucleotide sequence in relation to a second nucleotide sequence, refers to the ability of an oligonucleotide or polynucleotide comprising the first nucleotide sequence to hybridize and form base pairs, e.g., a duplex, with an oligonucleotide or polynucleotide comprising the second nucleotide sequence. In some embodiments, base pairs are typically formed by hydrogen bonds between nucleotide units in antiparallel polynucleotide strands. In some embodiments, complementary polynucleotide or oligonucleotide strands can form base pair in the Watson-Crick manner (e.g., A to T, A to U, C to G), or in any other manner that allows for the formation of duplexes. As persons skilled in the art are aware, when using RNA as opposed to DNA, uracil rather than thymine is the base that is considered to be complementary to adenosine. However, when a U is denoted in the context of the present disclosure, the ability to substitute a T is implied, unless otherwise stated. The term “complementary” as used herein can encompass fully complementary, partially complementary, or substantially complementary.

[0834] “Fully complementary”, “perfect complementarity”, or “100% complementarity” refers to the situation in which each nucleotide unit of one polynucleotide or oligonucleotide strand can base-pair with a nucleotide unit of a second polynucleotide or oligonucleotide strand. Where a first sequence is referred to as “substantially complementary” with respect to a second sequence herein, the two sequences can be fully complementary or they may form one or more, but generally not more than 5, 4, 3, or 2 mismatched or non-complimentary base pairs upon hybridization for a duplex, while still retaining the ability to hybridize under the conditions most relevant to their ultimate application. In some embodiments, two strands in which some but not all nucleotide units can base pair are considered substantially complementary or to have less than perfect complementarity. For example, for two 20-mers, if only two base pairs on each strand can base pair with each other, the polynucleotide strands exhibit 10% complementarity. In the same example, if 18 base pairs on each strand can base pair with each other, the polynucleotide strands exhibit 90% complementarity. In some embodiments, a siRNA (e.g., the antisense strand) that is substantially complementary to a desired target mRNA, has a sequence (e.g., the antisense strand) which is sufficient to bind the desired target mRNA, and to trigger the RNA silencing of the target mRNA.

[0835] As used herein, “control elements”, “regulatory control elements”, or “regulatory sequences” refers to elements used for expression of a gene or gene product. In some embodiments, these “control elements”, “regulatory control elements”, or “regulatory sequences” comprise promoter regions, polyadenylation signals, transcription termination sequences, upstream regulatory domains, origins of replication, internal ribosome entry sites (“IRES”), enhancers, and the like, which provide for the replication, transcription and translation of a coding sequence in a recipient cell. Not all of these control elements need always be present as long as the selected coding sequence is capable of being replicated, transcribed and/or translated in an appropriate host cell.

[0836] As used herein, the term “encapsulate” means to enclose, surround or encase. As an example, a capsid protein, e.g., an AAV capsid variant, often encapsulates a genetic element. In some embodiments, encapsulate within a capsid, e.g., an AAV capsid variant, encompasses 100% coverage by a capsid, as well as less than 100% coverage, e.g., 95% or less. For example, gaps or discontinuities may be present in the capsid so long as the genetic element is retained in the capsid, e.g., prior to entry into a cell.

[0837] As used herein, the term “effective amount” which can be used interchangeably herein, refer to an amount of a compound, formulation, material, or composition, as described herein to achieve a particular biological result. In some embodiments, an effective amount is a “therapeutically effective amount.” In some embodiments, the effective amount of an agent is that amount sufficient to effect beneficial or desired results, for example, clinical results. For example, in the context of administering an agent that treats cancer, an effective amount of an agent is, for example, an amount sufficient to achieve treatment, as defined herein, of cancer, as compared to the response obtained without administration of the agent.

[0838] As used herein, “expression” refers to transcription and/or translation of a particular nucleotide sequence. In some embodiments, expression comprises one or more of the following: (1) production of an RNA template from a DNA sequence (e.g., by transcription); (2) processing of an RNA transcript (e.g., by splicing, editing, 5′ cap formation, and/or 3′ end processing); (3) translation of an RNA into a polypeptide or protein; and (4) post-translational modification of a polypeptide or protein.

[0839] As used herein the term “heterologous” region or element (e.g., a nucleic acid sequence or an amino acid sequence), refers to a region or element that would not be considered a homologous region or element. In some embodiments, the heterologous region or element when used with respect to another region or element, refers to regions or elements that would not naturally be found together, e.g., in a wild-type virus, e.g., an AAV. In some embodiments, a heterologous nucleic acid sequence may be present in the same nucleic acid as a naturally occurring nucleic acid sequence (e.g., a sequence that is naturally occurring in the AAV). In some embodiments, a heterologous region or element is exogenous relative to an AAV from which other (e.g., the remainder of) elements/regions of the AAV particle are based.

[0840] As used herein the term “homologous region” refers to a region which is similar in position, structure, evolution origin, character, form or function.

[0841] As used herein, the term “homology” refers to the overall relatedness between polymeric molecules, e.g. between polynucleotide molecules (e.g. DNA molecules and/or RNA molecules) and/or between polypeptide molecules. In some embodiments, polymeric molecules are considered to be “homologous” to one another if their sequences are at least 25%, 30%, 35%, 40%, 45%, 50%, 55%, 60%, 65%, 70%, 75%, 80%, 85%, 90%, 95%, or 99% identical or similar. The term “homologous” necessarily refers to a comparison between at least two sequences (polynucleotide or polypeptide sequences). In accordance with the disclosure, two polynucleotide sequences are considered to be homologous if the polypeptides they encode are at least about 50%, 60%, 70%, 80%, 90%, 95%, or even 99% for at least one stretch of at least about 20 amino acids. In some embodiments, homologous polynucleotide sequences are characterized by the ability to encode a stretch of at least 4-5 uniquely specified amino acids. For polynucleotide sequences less than 60 nucleotides in length, homology is determined by the ability to encode a stretch of at least 4-5 uniquely specified amino acids. In accordance with the disclosure, two protein sequences are considered to be homologous if the proteins are at least about 50%, 60%, 70%, 80%, or 90% identical for at least one stretch of at least about 20 amino acids.

[0842] As used herein, the term “identity” refers to the subunit sequence identity between two polymeric molecules, e.g., between two nucleic acid molecules (e.g. two DNA molecules and/or two RNA molecules) and/or between two polypeptide molecules. When a subunit position in both of the two molecules is occupied by the same monomeric subunit; for example, if a position in each of two DNA molecules is occupied by adenine, then they are identical at that position. The identity between two sequences is a direct function of the number of matching positions; for example, if half (for example, five positions in a polymer ten subunits in length) of the positions in two sequences are homologous, the two sequences are 50% identical; if 90% of the positions (for example, 9 of 10), are matched, the two sequences are 90% identical.

[0843] Calculation of the percent identity of two polynucleotide sequences, for example, can be performed by aligning the two sequences for optimal comparison purposes (e.g., gaps can be introduced in one or both of a first and a second nucleic acid sequences for optimal alignment and non-identical sequences can be disregarded for comparison purposes). In certain embodiments, the length of a sequence aligned for comparison purposes is at least 30%, at least 40%, at least 50%, at least 60%, at least 70%, at least 80%, at least 90%, at least 95%, at least 99%, or 100% of the length of the reference sequence. The nucleotides at corresponding nucleotide positions are then compared. When a position in the first sequence is occupied by the same nucleotide as the corresponding position in the second sequence, then the molecules are identical at that position. The percent identity between the two sequences is a function of the number of identical positions shared by the sequences, taking into account the number of gaps, and the length of each gap, which needs to be introduced for optimal alignment of the two sequences.

[0844] The comparison of sequences and determination of percent identity between two sequences can be accomplished using a mathematical algorithm. For example, the percent identity between two nucleotide sequences can be determined using methods such as those described in Computational Molecular Biology, Lesk, A. M., ed., Oxford University Press, New York, 1988; Biocomputing: Informatics and Genome Projects, Smith, D. W., ed., Academic Press, New York, 1993; Sequence Analysis in Molecular Biology, von Heinje, G., Academic Press, 1987; Computer Analysis of Sequence Data, Part 1, Griffin, A. M., and Griffin, H. G., eds., Humana Press, New Jersey, 1994; and Sequence Analysis Primer, Gribskov, M. and Devereux, J., eds., M Stockton Press, New York, 1991; each of which is incorporated herein by reference. For example, the percent identity between two nucleotide sequences can be determined using the algorithm of Meyers and Miller (CABIOS, 1989, 4:11-17), which has been incorporated into the ALIGN program (version 2.0) using a PAM120 weight residue table, a gap length penalty of 12 and a gap penalty of 4. The percent identity between two nucleotide sequences can, alternatively, be determined using the GAP program in the GCG software package using an NWSgapdna.CMP matrix. Methods commonly employed to determine percent identity between sequences include, but are not limited to those disclosed in Carillo, H. and Lipman, D., SIAM J Applied Math., 48:1073 (1988); incorporated herein by reference. Techniques for determining identity are codified in publicly available computer programs. Exemplary computer software to determine homology between two sequences include, but are not limited to, GCG program package, Devereux, J., et al., Nucleic Acids Research, 12(1), 387 (1984)), BLASTP, BLASTN, and FASTA Altschul, S. F. et al., J. Molec. Biol., 215, 403 (1990)).

[0845] As used herein, the phrase “inhibit expression of a gene” means to cause a reduction in the amount of an expression product of the gene. The expression product can be an RNA transcribed from the gene (e.g., an mRNA) or a polypeptide translated from an mRNA transcribed from the gene. Typically, a reduction in the level of an mRNA results in a reduction in the level of a polypeptide translated therefrom. The level of expression may be determined using standard techniques for measuring mRNA or protein

[0846] As used herein, the term “isolated” refers to a substance or entity that is altered or removed from the natural state, e.g., altered or removed from at least some of component with which it is associated in the natural state. For example, a nucleic acid or a peptide naturally present in a living animal is not “isolated,” but the same nucleic acid or peptide partially or completely separated from the coexisting materials of its natural state is “isolated.” An isolated nucleic acid or protein can exist in substantially purified form, or can exist in a non-native environment such as, for example, a host cell. Such polynucleotides could be part of a vector and/or such polynucleotides or polypeptides could be part of a composition, and still be isolated in that such vector or composition is not part of the environment in which it is found in nature. In some embodiments, an isolated nucleic acid is recombinant, e.g., incorporated into a vector.

[0847] As used herein “linker” refers to a molecule or group of molecules which connects two molecules, such as to link a variable heavy and a variable light chain in the context of an scFv or an antibody. In some embodiments, the linker is a nucleic acid sequence connecting two nucleic acid sequences encoding two different polypeptides. In some embodiments, the linker may or may not be translated. In some embodiments, the linker is a cleavable linker. In some embodiments, the linker is a polypeptide linker, e.g., a flexible polypeptide linker, that comprises amino acids such as glycine or serine residues used alone or in combination.

[0848] The term “Fyn SH3-derived polypeptide”, used interchangeably herein with the term “Fynomer”, refers to a non-immunoglobulin-derived binding polypeptide (e.g. a so-called scaffold) derived from the human Fyn SH3 domain. Fyn SH3-derived polypeptides are well-known in the art and have been described e.g. in Grabulovski et al. (2007) JBC, 282, p. 3196-3204, WO 2008/022759, Bertschinger et al (2007) Protein Eng Des Sel 20(2):57-68, Gebauer and Skerra (2009) Curr Opinion in Chemical Biology 13:245-255, or Schlatter et al. (2012), MAbs 4:4, 1-12). FynomAbs are fusion proteins of an antibody and a Fyn SH3-derived binding protein (Brack et al. (2014), Mol Cancer Ther 13(8):2030-2039).

[0849] As used herein, the phrase “operably linked” refers to a functional connection between two or more molecules, constructs, transcripts, entities, moieties or the like. In some embodiments, operably linked refers to functional linkage between a regulatory sequence and a heterologous nucleic acid sequence resulting in expression of the latter. For example, a first nucleic acid sequence is operably linked with a second nucleic acid sequence when the first nucleic acid sequence is placed in a functional relationship with the second nucleic acid sequence. For instance, a promoter is operably linked to a coding sequence if the promoter affects the transcription or expression of the coding sequence. Operably linked DNA sequences can be contiguous with each other and, e.g., where necessary to join two protein coding regions, are in the same reading frame.

[0850] As used herein, a “microRNA (miRNA) binding site” or a “miR binding site” comprises a nucleic acid sequence (whether RNA or DNA, e.g., differ by “U” of RNA or “T” in DNA) that is capable of binding, or binds, in whole or in part to a microRNA (miR) through complete or partial hybridization. Typically, such binding occurs between the miR and the miR binding site in the reverse complement orientation. In some embodiments, the miR binding site is transcribed from the AAV genetic element encoding the miR binding site.

[0851] In some embodiments, a miR binding site may be encoded or transcribed in series. Such a “miR binding site series” or “miR BSs” may include two or more miR binding sites having the same or different nucleic acid sequence.

[0852] As used herein, a “spacer” is generally any selected nucleic acid sequence of, e.g., 1, 2, 3, 4, 5, 6, 7, 8, 9, or 10 nucleotides in length, which is located between two or more consecutive miR binding site sequences. Spacers may also be more than 10 nucleotides in length, e.g., 20, 30, 40, or 50 or more than 50 nucleotides.

[0853] As used herein, the term “polypeptide” refers to polymers of amino acids. The polymer may be linear or branched, it may comprise modified amino acids, and it may be interrupted by non-amino acids. The terms also encompass an amino acid polymer that has been modified; for example, disulfide bond formation, glycosylation, lipidation, acetylation, phosphorylation, or any other manipulation, such as conjugation with a labeling component. The polypeptide can be isolated from natural sources, can be a produced by recombinant techniques from a eukaryotic or prokaryotic host, or can be a product of synthetic procedures. In some embodiments, the polypeptide is greater than 50 amino acids in length.

[0854] As used herein, “peptide” is less than or equal to 50 amino acids long, e.g., about 5, 10, 15, 20, 25, 30, 35, 40, 45, or 50 amino acids long.

[0855] The term “polypeptide variant” refers to molecules which differ in their amino acid sequence from a native or reference sequence. In some embodiments, the amino acid sequence variants may possess substitutions, deletions, and/or insertions at certain positions within the amino acid sequence, as compared to a native or reference sequence. In some embodiments, a variant comprises a sequence having at least about 50%, at least about 80%, or at least about 90%, identical (homologous) to a native or a reference sequence.

[0856] The term “amino acid” is intended to embrace all molecules, whether natural or synthetic, which include both an amino functionality and an acid functionality and capable of being included in a polymer of naturally-occurring amino acids. Exemplary amino acids include naturally-occurring amino acids; analogs, derivatives and congeners thereof; amino acid analogs having variant side chains; and all stereoisomers of any of any of the foregoing. As used herein the term “amino acid” includes both the D- or L-optical isomers and peptidomimetics.

[0857] As used herein the term “conservative sequence modification” refers to the modification of an amino acid that does not significantly affect or alter the characteristics of the protein, e.g., the binding characteristics of an antibody or antibody fragment. Such conservative modifications include substitutions, additions, or deletions. Modifications can be introduced into a sequence described herein, e.g., an antibody or antibody fragment described herein, by standard techniques known in the art, such as site-directed mutagenesis and PCR-mediated mutagenesis. Conservative substitutions are ones in which the amino acid residue is replaced with an amino acid residue having a similar side chain. Families of amino acid residues having similar side chains have been defined in the art. These families include amino acids with basic side chains (for example, lysine, arginine, histidine), acidic side chains (for example, aspartic acid, glutamic acid), uncharged polar side chains (for example, glycine, asparagine, glutamine, serine, threonine, tyrosine, cysteine, tryptophan), nonpolar side chains (for example, alanine, valine, leucine, isoleucine, proline, phenylalanine, methionine), beta-branched side chains (for example, threonine, valine, isoleucine) and aromatic side chains (for example, tyrosine, phenylalanine, tryptophan, histidine).

[0858] “Insertional variants” when referring to proteins are those with one or more amino acids inserted, e.g., immediately adjacent or subsequent, to a position in an amino acid sequence. “Immediately adjacent” or “immediately subsequent” to an amino acid means connected to either the alpha-carboxy or alpha-amino functional group of the amino acid.

[0859] “Deletional variants” when referring to proteins, are those with one or more amino acids in deleted from a reference protein.

[0860] The term “variant” refers to a polypeptide or polynucleotide that has an amino acid or a nucleotide sequence that is substantially identical, e.g., having at least 70%, 75%, 80%, 85%, 90%, 95% or 99% sequence identity to a reference sequence. In some embodiments, the variant is a functional variant.

[0861] The term “functional variant” refers to a polypeptide variant or a polynucleotide variant that has at least one activity of the reference sequence.

[0862] The phrase “pharmaceutically acceptable” is employed herein to refer to those compounds, materials, compositions, and/or dosage forms which are, within the scope of sound medical judgment, suitable for use in contact with the tissues of human beings and animals without excessive toxicity, irritation, allergic response, or other problem or complication, commensurate with a reasonable benefit/risk ratio.

[0863] As used herein, the term “preventing,” “prevent,” and “prevention” refer to an action that occurs before the subject begins to suffer from the condition, or relapse of the condition. Prevention need not result in a complete prevention of the condition; partial prevention or reduction of the condition or a symptom of the condition, or reduction of the risk of developing the condition, is encompassed by this term.

[0864] As used herein, a “prophylaxis” means the prevention of or protective treatment for a disease or disease state.

[0865] The terms “nucleic acid,” “nucleic acid sequence,” “nucleotide sequence,” or “polynucleotide sequence,” and “polynucleotide” are used interchangeably. They refer to a polymeric form of nucleotides of any length, either deoxyribonucleotides or ribonucleotides, or analogs thereof. The polynucleotide may be either single-stranded or double-stranded, and if single-stranded may be the coding strand or non-coding (antisense) strand. A polynucleotide may comprise modified nucleotides, such as methylated nucleotides and nucleotide analogs. The sequence of nucleotides may be interrupted by non-nucleotide components. A polynucleotide may be further modified after polymerization, such as by conjugation with a labeling component. The nucleic acid may be a recombinant polynucleotide, or a polynucleotide of genomic, cDNA, semisynthetic, or synthetic origin which either does not occur in nature or is linked to another polynucleotide in a non-natural arrangement.

[0866] As used herein, the term “RNA” or “RNA molecule” or “ribonucleic acid molecule” refers to a polymer of ribonucleotides; the term “DNA” or “DNA molecule” or “deoxyribonucleic acid molecule” refers to a polymer of deoxyribonucleotides. DNA and RNA can be synthesized naturally, e.g., by DNA replication and transcription of DNA, respectively; or be chemically synthesized. DNA and RNA can be single-stranded (i.e., ssRNA or ssDNA, respectively) or multi-stranded (e.g., double stranded, i.e., dsRNA and dsDNA, respectively). The term “mRNA” or “messenger RNA”, as used herein, refers to a single stranded RNA that encodes the amino acid sequence of one or more polypeptide chains.

[0867] As used herein, a “self-complementary viral particle” is a particle comprised of at least two components, a capsid and a polynucleotide sequence encoding a self-complementary genome (e.g., a genetic element) enclosed within the capsid. As used herein, the phrase “signal sequence” refers to a sequence which can direct the transport or localization of a protein.

[0868] As used herein, the term “subject” refers to any organism to which a composition in accordance with the disclosure may be administered, e.g., for experimental, diagnostic, prophylactic, and/or therapeutic purposes. Typical subjects include animals (e.g., mammals such as mice, rats, rabbits, non-human primates, and humans) and/or plants. In some embodiments, an animal refers to any member of the animal kingdom. In some embodiments, animal refers to a human at any stage of development. In some embodiments, animal refers to a non-human animal at any stage of development. In certain embodiments, the non-human animal is a mammal (e.g., a rodent, a mouse, a rat, a rabbit, a monkey, a dog, a cat, a sheep, cattle, a primate, or a pig). In some embodiments, animals include, but are not limited to, mammals, birds, reptiles, amphibians, fish, and worms. In some embodiments, the animal is a transgenic animal, genetically-engineered animal, or a clone. In some embodiments, the subject is a patient.

[0869] An individual who is “susceptible to” a disease, disorder, and/or condition has not been diagnosed with and/or may not exhibit symptoms of the disease, disorder, and/or condition but harbors a propensity to develop a disease or its symptoms. In some embodiments, an individual who is susceptible to a disease, disorder, and/or condition (for example, cancer) may be characterized by one or more of the following: (1) a genetic mutation associated with development of the disease, disorder, and/or condition; (2) a genetic polymorphism associated with development of the disease, disorder, and/or condition; (3) increased and/or decreased expression and/or activity of a protein and/or nucleic acid associated with the disease, disorder, and/or condition; (4) habits and/or lifestyles associated with development of the disease, disorder, and/or condition; (5) a family history of the disease, disorder, and/or condition; and (6) exposure to and/or infection with a microbe associated with development of the disease, disorder, and/or condition. In some embodiments, an individual who is susceptible to a disease, disorder, and/or condition will develop the disease, disorder, and/or condition. In some embodiments, an individual who is susceptible to a disease, disorder, and/or condition will not develop the disease, disorder, and/or condition.

[0870] The term “synthetic” is generally used herein to refer to compositions, e.g., compositions described herein, that are not naturally occurring.

[0871] As used herein, “naturally occurring” or “wild-type” refers to a substance or entity that has not been altered, e.g., structurally altered, or removed from the natural state, e.g., removed from at least some of component with which it is associated in the natural state. In some embodiments, a naturally occurring when referring to sequence refers to a sequence identical to a wild-type sequence or a naturally occurring variant thereof.

[0872] As used herein, “transfection,” “transformed,” or “transduced” refers to a process by which an exogenous nucleic acid is transferred or introduced into a host cell. A “transfected” or “transformed” or “transduced” cell is one which has been transfected, transformed, or transduced with exogenous nucleic acid. The cell includes the primary subject cell and its progeny.

[0873] As used herein, the terms “treat,” “treatment,” and “treating” refer to partially or completely alleviating, ameliorating, improving, relieving, delaying onset of, inhibiting progression of, reducing duration of, reducing severity of, and/or reducing incidence of one or more symptoms or features (preferably, one or more discernable symptoms) of an infection, disease, disorder, and/or condition, resulting from administration of one or more therapies (for example one or more therapeutic agents such as an AAV particle of the invention). In some embodiments, the terms “treat”, “treatment” and “treating” refer to the amelioration of at least one measurable physical parameter of a disorder. In other embodiments, the terms “treat”, “treatment” and “treating” refer to the inhibition of the progression of a disorder, either physically by, for example, stabilization of a discernible symptom, physiologically by, for example, stabilization of a physical parameter, or both. In other embodiments the terms “treat”, “treatment” and “treating” refer to the reduction or stabilization of a symptom of the disorder. For example, “treating” a cancer may refer to inhibiting survival, growth, and/or spread of a tumor or a reduction or stabilization of tumor size or cancerous cell count. In some embodiments, treatment may be administered to a subject who does not exhibit signs of a disease, disorder, and/or condition and/or to a subject who exhibits only early signs of a disease, disorder, and/or condition for the purpose of decreasing the risk of developing pathology associated with the disease, disorder, and/or condition.

[0874] As used herein, the terms “Her-2,” “ErbB2,” “c-Erb-B2,” “HER2,” “Her2,” and “neu” are used interchangeably and refer to native HER2, and allelic variants thereof, as described, for example, in Semba et al., 1985, P.N.A.S. USA 82:6497-650 and Yamamoto et al., 1986, Nature 319:230-234 and Genebank accession number X03363. Unless indicated otherwise, the terms “HER2,” “ErbB2,” “c-Erb-B2,” “HER2,” and “Her2” when used herein refer to the human protein. The gene encoding Her2 is referred to herein as “ErbB2.”

[0875] As used herein, the term “HER2/ErbB2 status” refers to assessment of expression of HER2/ErbB2 in a patient, or patient's cells (e.g., cancer cells) as a biomarker, and the status typically is reported as “HER2/ErbB2 positive” when the biomarker is present in overabundance as compared to a normal healthy non-cancer breast tissue sample or “HER2/ErbB2 negative” when the biomarker is present at a level no greater than a normal healthy non-cancer breast tissue sample as determined by an IHC stain test of a fixed tissue sample. Various methods are known in the art for assessing HER2/ErbB2 status, typically focusing on the amount of the receptor (IHC), or mRNA levels (qPCR), or gene copy number (FISH), that is expressed by a patient's cells to thereby diagnose a patient as HER2/ErbB positive (when this receptor is overexpressed or amplified in the patient's cells) or HER2/ErbB negative (when this receptor is not overexpressed or not amplified on patient's cells). Overexpression and amplification are terms of art describing levels elevated above those found in similar tissue from a normal disease-free individual.

[0876] As used herein, the term “chemotherapy” or “chemotherapeutic agent” refers to treatment with a cytostatic or cytotoxic agent (i.e., a compound) to reduce or eliminate the growth or proliferation of undesirable cells, for example cancer cells. Thus, as used herein, “chemotherapy” or “chemotherapeutic agent” refers to a cytotoxic or cytostatic agent used to treat a proliferative disorder, for example cancer.

[0877] As used herein, the term “targeted pathway drug,” “pathway drug,” or “targeted drug,” refers to any molecule or antibody with therapeutic capacity designed to bind to a specific biomolecule (e.g., protein) involved in a disease process, thereby regulating its activity.

[0878] As used herein, the terms “HER2 therapy” or “HER2-targeted therapy” refer to treatments using one or more therapeutic agents that are designed to specifically target the HER2 molecule and/or signaling pathway(s), including but not limited to, for example antibodies and small molecules that target the HER2 molecule and/or signaling pathway(s). Such HER2 therapies may also target other members of the HER family, for example therapies that target both HER1 and HER2, HER1, HER2, and HER4, or HER3 alone.

[0879] As used herein, the term “CNS neoplasms” includes primary or metastatic cancers, which may be located in the brain (intracranial), meninges (connective tissue layer covering brain and spinal cord), or spinal cord.

[0880] As used herein, the term “progression-free survival (PFS)” refers to the time from treatment to first disease progression or death. For example, it is the time that the subject remains alive, without return of the cancer, e.g., for a defined period of time such as about 1 month, 1.2 months, 2 months, 2.4 months, 2.9 months, 3 months, 3.5 months, 4, months, 6 months, 7 months, 8 months, 9 months, 1 year, about 2 years, about 3 years, etc., from initiation of treatment or from initial diagnosis.

[0881] As used herein, the term “overall survival (OS)” refers to the subject remaining alive for a defined period of time, such as about 1 year, about 2 years, about 3 years, about 4 years, about 5 years, about 10 years, etc., from initiation of treatment or from initial diagnosis.

### II. COMPOSITIONS

[0882] According to the present disclosure, compositions for delivering functional anti-HER2 antibodies by adeno-associated virus particles (AAVs) are provided. In some embodiments, an AAV particle, e.g., an AAV particle as described herein, or plurality of particles, may be provided, e.g., delivered, via any of several routes of administration, to a cell, tissue, organ, or organism, in vivo, ex vivo, or in vitro.

[0883] In some embodiments, AAV particles, nucleic acids, e.g., nucleic acid molecules encoding an antibody molecule, and/or payloads, e.g., an antibody molecule, and methods of using and making the same are described in WO2017189963, the contents of which are herein incorporated by reference in their entirety.

[0884] In some embodiments, the nucleic acid sequences, genetic elements, AAV vectors, and polypeptides disclosed herein may be engineered to contain modular elements and/or sequence motifs assembled to enable expression of an antibody molecule or fragment thereof, e.g., an antibody molecule described herein. In some embodiments, the genetic element comprises a nucleotide sequence encoding a transgene encoding an antibody molecule (e.g., an antibody molecule described herein). In some embodiments, the nucleic acid sequence encodes an antibody molecule comprising one or more of the CDRs (e.g., heavy chain and/or light chain CDRs) of an antibody molecule, a variable heavy (VH) chain region and/or variable light (VL) chain region, a heavy and/or light chain constant region, a heavy and/or light chain, or a combination thereof. In some embodiments, the nucleic acid sequence encoding the antibody molecule may also encode a linker, e.g., such that the VH/heavy chain and the VL/light chain of the encoded antibody molecule are connected via a linker. In some embodiments, the order of expression, structural position, or concatemer count (e.g., the VH, VL, heavy chain, light chain, and/or linker) may be different within or among genetic element sequences. In some embodiments, the identity, position, and number of linkers expressed by a genetic element described herein may vary. In some embodiments, the genetic element may further comprise an internal repeat (ITR) sequence, promoter region, an intron region, an exon region, a Kozak sequence, an enhancer, a polyadenylation sequence, or combination thereof.

[0885] In some embodiments, the present disclosure provides methods for delivering an antibody molecule (e.g., an anti-HER2 antibody described herein) and/or a nucleic acid sequence encoding an antibody molecule (e.g., an anti-HER2 antibody described herein) comprised within the genetic element comprised within a recombinant, AAV particle (e.g., an AAV particle described herein) to a cell, tissue, organ, or subject.

### Adeno-Associated Viruses (AAVs) and AAV Particles

[0886] In some embodiments, AAV are used as a biological tool due to a relatively simple structure, their ability to infect a wide range of cells (including quiescent and dividing cells) without integration into the host genome and without replicating, and their relatively benign immunogenic profile. In some embodiments, the genome, e.g., genetic element, of the virus may be manipulated to contain a minimum of components for the assembly of a functional recombinant virus, or viral particle, which is loaded with or engineered to target a particular tissue and express or deliver a desired payload, e.g., an antibody molecule (e.g., an anti-HER2 antibody molecule).

[0887] In some embodiments, the AAV, e.g., naturally occurring (e.g., wild-type) AAV or a recombinant AAV, comprises a genetic element which is a linear, single-stranded nucleic acid molecule, e.g., DNA (ssDNA). In some embodiments, the genetic element, e.g., of a naturally occurring (e.g., wild-type) AAV, is approximately 5,000 nucleotides (nt) in length. In some embodiments, inverted terminal repeats (ITRs) traditionally cap the viral genome at both the 5′ and the 3′ end, providing origins of replication for the viral genome. In some embodiments, an AAV genetic element comprises two ITR sequences. In some embodiments, the ITRs have a characteristic T-shaped hairpin structure defined by a self-complementary region (145 nt in wild-type AAV) at the 5′ and 3′ ends of the ssDNA which form an energetically stable double stranded region. The double stranded hairpin structures comprise multiple functions including, but not limited to, acting as an origin for DNA replication by functioning as primers for the endogenous DNA polymerase complex of the host viral replication cell.

[0888] In some embodiments, the AAV particle, e.g., an AAV particle (e.g., ssAAVs) described herein comprises a viral genome, e.g., genetic element and/or AAV vector, that is self-complementary (scAAV). In some embodiments, the ssAAV comprises nucleic acid molecules, e.g., DNA strands, that anneal together to form double stranded DNA. In some embodiments, a scAAV allows for rapid expression in a transduced cell as it bypasses second strand synthesis.

[0889] In some embodiments, the AAV genetic element further comprises nucleotide sequences for two open reading frames, one for the four non-structural Rep proteins (e.g., Rep78, Rep68, Rep52, and/or Rep40 (e.g., Rep52 and Rep78), encoded by Rep genes) and one for the three capsid, or structural, proteins (e.g., VP1, VP2, VP3, encoded by capsid genes or Cap genes). The Rep proteins are used for replication and packaging, while the capsid proteins are assembled to create the protein shell of the AAV particle, or AAV capsid. In some embodiments, alternative splicing and alternate initiation codons and promoters result in the generation of four different Rep proteins from a single open reading frame and the generation of three capsid proteins from a single open reading frame. For example, in some embodiments, for the AAV9/hu.14 serotype (SEQ ID NO: 138 and 137; e.g., as described in U.S. Pat. No. 7,906,111, the contents of which are herein incorporated by reference in their entirety), VP1 refers to amino acids 1-736, VP2 refers to amino acids 138-736, and VP3 refers to amino acids 203-736. In some embodiments, VP1 is the full-length capsid sequence, while VP2 and VP3 are shorter components of the whole. As a result, changes in the sequence in the VP3 region, are also changes to VP1 and VP2, however, the percent difference as compared to the parent sequence will be greatest for VP3 since it is the shortest sequence of the three. Though described here in relation to the amino acid sequence, the nucleotide sequence encoding these proteins can be similarly described. In some embodiments, the three capsid proteins assemble to create the AAV capsid protein. In some embodiments, the AAV capsid protein typically comprises a molar ratio of 1:1:10 of VP1:VP2:VP3.

[0890] In some embodiments, a genetic element of a wild-type, e.g., naturally occurring, AAV can be modified to replace the rep/cap sequences with a nucleic acid comprising a transgene encoding a payload, e.g., an antibody molecule, wherein the genetic element comprises at least one ITR region. In some embodiments, the genetic element of a recombinant AAV comprises two ITR regions, e.g., a 5′ITR or a 3′ITR. In some embodiments, the rep/cap sequences can be provided in trans during production to generate AAV particles. In some embodiments, the genetic element of an AAV is comprised in an AAV vector, which further encodes a capsid protein e.g., a structural protein, wherein the capsid protein comprises a VP1 polypeptide, a VP2 polypeptide, and/or a VP3 polypeptide; and/or a Rep protein, e.g., a non-structural protein, wherein the Rep protein comprises a Rep78 protein, a Rep68, Rep52 protein, and/or a Rep40 protein (e.g., a Rep25 protein and/or a Rep78 protein).

[0891] In some embodiments, in addition to the genetic element comprising a nucleic acid encoding a transgene encoding a payload (e.g., an antibody molecule, e.g., an anti-HER2 antibody molecule), an AAV particle, e.g., an AAV particle described herein, may comprise the genetic element, in whole or in part, of any naturally occurring and/or recombinant AAV serotype nucleotide sequence or variant. In some embodiments, AAV variants may have sequences of significant homology at the nucleic acid (genetic element or capsid) and amino acid levels (capsids), to produce constructs which are generally physical and functional equivalents, replicate by similar mechanisms, and assemble by similar mechanisms. Chiorini et al., J. Vir. 71: 6823-33(1997); Srivastava et al., J. Vir. 45:555-64 (1983); Chiorini et al., J. Vir. 73:1309-1319 (1999); Rutledge et al., J. Vir. 72:309-319 (1998); and Wu et al., J. Vir. 74: 8635-47 (2000), the contents of each of which are incorporated herein by reference in their entirety.

[0892] In some embodiments, AAV particles of the present disclosure are recombinant AAV particles which are replication defective and lacking the nucleotide sequences encoding functional Rep and Cap proteins. In some embodiments, these defective AAV particles may lack most or all parental coding sequences and carry only one or two AAV ITR sequences and the nucleic acid of interest for delivery to a cell, a tissue, an organ, or an organism.

[0893] In some embodiments, the genetic element or the AAV vector of the AAV particles described herein comprise at least one control element which provides for the replication, transcription, and translation of a coding sequence encoded therein. In some embodiments, a sufficient number of control elements are present such that the coding sequence of the transgene encoded by the genetic element is capable of being replicated, transcribed, and/or translated in a host cell. Non-limiting examples of expression control elements include sequences for transcription initiation and/or termination, promoter and/or enhancer sequences, efficient RNA processing signals such as splicing and polyadenylation signals, sequences that stabilize cytoplasmic mRNA, sequences that enhance translation efficacy (e.g., Kozak consensus sequence), sequences that enhance protein stability, and/or sequences that enhance protein processing and/or secretion.

[0894] In some embodiments, the recombinant AAV particles of the present disclosure are capable of providing, e.g., delivering, a transgene to a mammalian cell. In some embodiments, the recombinant AAV particles of the present disclosure are capable of vectorized delivery of an antibody molecule (e.g., an anti-HER2 antibody molecule) or fragment thereof.

[0895] In some embodiments, the AAV particles, vectors, genetic elements, and/or nucleic acids of the present disclosure may be produced recombinantly and may be based on adeno-associated virus (AAV) parent or reference sequences. Methods for producing and/or modifying AAV particles are disclosed in the art such as pseudotyped AAV vectors (PCT Patent Publication Nos. WO200028004; WO200123001; WO2004112727; WO2005005610; and WO2005072364, the content of each of which is incorporated herein by reference in its entirety). In some embodiments, the AAV particles described herein may be modified to enhance the efficiency of delivery, e.g., delivery of a transgene encoding a payload, e.g., an antibody molecule. Without wishing to be bound by theory, it is believed in some embodiments, that a modified, e.g., recombinant, AAV particle can be packaged efficiently and successfully infect target cells at high frequency and with minimal toxicity. In some embodiments, the capsid protein of the AAV particles is engineered according to the methods described in US Publication Number US20130195801, the contents of which are incorporated herein by reference in their entirety.

### AAV Capsids and Variants Thereof

[0896] In some embodiments, an AAV particle, e.g., an AAV particle for the vectorized delivery of an antibody molecule described herein (e.g., an HER-2 antibody molecule), may comprise an AAV capsid polypeptide, e.g., an AAV capsid variant. In some embodiments, the AAV capsid polypeptide, e.g., an AAV capsid variant comprises a VOY101 capsid polypeptide, a VOY9P39 capsid polypeptide, a VOY9P33 capsid polypeptide, a AAVPHP.B (PHP.B) capsid polypeptide, a AAVPHP.N (PHP.N) capsid polypeptide, an AAV1 capsid polypeptide, an AAV2 capsid polypeptide, an AAV5 capsid polypeptide, an AAV9 capsid polypeptide, an AAVrh10 capsid polypeptide, or a functional variant thereof. In some embodiments, the AAV capsid polypeptide, e.g., AAV capsid variant, comprises an amino acid sequence of any of the AAV capsid polypeptides in Table 1, or an amino acid sequence substantially identical (e.g., having at least 70%, 75%, 80%, 85%, 90%, 92%, 95%, 97%, 98%, or 99% sequence identity) thereto. In some embodiments, the nucleotide sequence encoding the AAV capsid polypeptide comprises any one of the nucleotide sequence in Table 1, or a nucleotide sequence substantially identical (e.g., having at least 70%, 75%, 80%, 85%, 90%, 92%, 95%, 97%, 98%, or 99% sequence identity) thereto.

TABLE 1
Exemplary full length capsid sequences

| | SEQ | |
|---|---|---|
| | ID | |
| Description | NO: | Sequence Information |
| VOY101 | 1 | MAADGYLPDWLEDNLSEGIREWWALKPGAPQPKANQQHQDNARGLVLPGYKYLGPGNGL |
| | | DKGEPVNAADAAALEHDKAYDQQLKAGDNPYLKYNHADAEFQERLKEDTSFGGNLGRAV |
| | | FQAKKRLLEPLGLVEEAAKTAPGKKRPVEQSPQEPDSSAGIGKSGAQPAKKRLNFGQTG |
| | | DTESVPDPQPIGEPPAAPSGVGSLTMASGGGAPVADNNEGADGVGSSSGNWHCDSQWLG |
| | | DRVITTSTRTWALPTYNNHLYKQISNSTSGGSSNDNAYFGYSTPWGYFDFNRFHCHFSP |
| | | RDWQRLINNNWGFRPKRLNFKLFNIQVKEVTDNNGVKTIANNLTSTVQVFTDSDYQLPY |
| | | VLGSAHEGCLPPFPADVFMIPQYGYLTLNDGSQAVGRSSFYCLEYFPSQMLRTGNNFQF |
| | | SYEFENVPFHSSYAHSQSLDRLMNPLIDQYLYYLSKTINGSGQNQQTLKFSVAGPSNMA |
| | | VQGRNYIPGPSYRQQRVSTTVTQNNNSEFAWPGASSWALNGRNSLMNPGPAMASHKEGE |
| | | DRFFPLSGSLIFGKQGTGRDNVDADKVMITNEEEIKTTNPVATESYGQVATNHQSDGTL |
| | | AVPFKAQAQTGWVQNQGILPGMVWQDRDVYLQGPIWAKIPHTDGNFHPSPLMGGFGMKH |
| | | PPPQILIKNTPVPADPPTAFNKDKLNSFITQYSTGQVSVEIEWELQKENSKRWNPEIQY |
| | | TSNYYKSNNVEFAVNTEGVYSEPRPIGTRYLTRNL |
| AAV9/hu.14 | 138 | MAADGYLPDWLEDNLSEGIREWWALKPGAPQPKANQQHQDNARGLVLPGYKYLGPGNGL |
| WT (amino | | DKGEPVNAADAAALEHDKAYDQQLKAGDNPYLKYNHADAEFQERLKEDTSFGGNLGRAV |
| acid) | | FQAKKRLLEPLGLVEEAAKTAPGKKRPVEQSPQEPDSSAGIGKSGAQPAKKRLNFGQTG |
| | | DTESVPDPQPIGEPPAAPSGVGSLTMASGGGAPVADNNEGADGVGSSSGNWHCDSQWLG |
| | | DRVITTSTRTWALPTYNNHLYKQISNSTSGGSSNDNAYFGYSTPWGYFDFNRFHCHFSP |
| | | RDWQRLINNNWGFRPKRLNFKLFNIQVKEVTDNNGVKTIANNLTSTVQVFTDSDYQLPY |
| | | VLGSAHEGCLPPFPADVFMIPQYGYLTLNDGSQAVGRSSFYCLEYFPSQMLRTGNNFQF |
| | | SYEFENVPFHSSYAHSQSLDRLMNPLIDQYLYYLSKTINGSGQNQQTLKFSVAGPSNMA |
| | | VQGRNYIPGPSYRQQRVSTTVTQNNNSEFAWPGASSWALNGRNSLMNPGPAMASHKEGE |
| | | DRFFPLSGSLIFGKQGTGRDNVDADKVMITNEEEIKTTNPVATESYGQVATNHQSAQAQ |
| | | AQTGWVQNQGILPGMVWQDRDVYLQGPIWAKIPHTDGNFHPSPLMGGFGMKHPPPQILI |
| | | KNTPVPADPPTAFNKDKLNSFITQYSTGQVSVEIEWELQKENSKRWNPEIQYTSNYYKS |
| | | NNVEFAVNTEGVYSEPRPIGTRYLTRNL |
| AAV9/hu.14 | 137 | ATGGCTGCCGATGGTTATCTTCCAGATTGGCTCGAGGACAACCTTAGTGAAGGAATTCG |
| WT (DNA) | | CGAGTGGTGGGCTTTGAAACCTGGAGCCCCTCAACCCAAGGCAAATCAACAACATCAAG |
| | | ACAACGCTCGAGGTCTTGTGCTTCCGGGTTACAAATACCTTGGACCCGGCAACGGACTC |
| | | GACAAGGGGGAGCCGGTCAACGCAGCAGACGCGGCGGCCCTCGAGCACGACAAGGCCTA |
| | | CGACCAGCAGCTCAAGGCCGGAGACAACCCGTACCTCAAGTACAACCACGCCGACGCCG |
| | | AGTTCCAGGAGCGGCTCAAAGAAGATACGTCTTTTGGGGGCAACCTCGGGCGAGCAGTC |
| | | TTCCAGGCCAAAAAGAGGCTTCTTGAACCTCTTGGTCTGGTTGAGGAAGCGGCTAAGAC |
| | | GGCTCCTGGAAAGAAGAGGCCTGTAGAGCAGTCTCCTCAGGAACCGGACTCCTCCGCGG |
| | | GTATTGGCAAATCGGGTGCACAGCCCGCTAAAAAGAGACTCAATTTCGGTCAGACTGGC |
| | | GACACAGAGTCAGTCCCAGACCCTCAACCAATCGGAGAACCTCCCGCAGCCCCCTCAGG |
| | | TGTGGGATCTCTTACAATGGCTTCAGGTGGTGGCGCACCAGTGGCAGACAATAACGAAG |
| | | GTGCCGATGGAGTGGGTAGTTCCTCGGGAAATTGGCATTGCGATTCCCAATGGCTGGGG |
| | | GACAGAGTCATCACCACCAGCACCCGAACCTGGGCCCTGCCCACCTACAACAATCACCT |
| | | CTACAAGCAAATCTCCAACAGCACATCTGGAGGATCTTCAAATGACAACGCCTACTTCG |
| | | GCTACAGCACCCCCTGGGGGTATTTTGACTTCAACAGATTCCACTGCCACTTCTCACCA |
| | | CGTGACTGGCAGCGACTCATCAACAACAACTGGGGATTCCGGCCTAAGCGACTCAACTT |
| | | CAAGCTCTTCAACATTCAGGTCAAAGAGGTTACGGACAACAATGGAGTCAAGACCATCG |
| | | CCAATAACCTTACCAGCACGGTCCAGGTCTTCACGGACTCAGACTATCAGCTCCCGTAC |
| | | GTGCTCGGGTCGGCTCACGAGGGCTGCCTCCCGCCGTTCCCAGCGGACGTTTTCATGAT |
| | | TCCTCAGTACGGGTATCTGACGCTTAATGATGGAAGCCAGGCCGTGGGTCGTTCGTCCT |
| | | TTTACTGCCTGGAATATTTCCCGTCGCAAATGCTAAGAACGGGTAACAACTTCCAGTTC |
| | | AGCTACGAGTTTGAGAACGTACCTTTCCATAGCAGCTACGCTCACAGCCAAAGCCTGGA |
| | | CCGACTAATGAATCCACTCATCGACCAATACTTGTACTATCTCTCAAAGACTATTAACG |
| | | GTTCTGGACAGAATCAACAAACGCTAAAATTCAGTGTGGCCGGACCCAGCAACATGGCT |
| | | GTCCAGGGAAGAAACTACATACCTGGACCCAGCTACCGACAACAACGTGTCTCAACCAC |
| | | TGTGACTCAAAACAACAACAGCGAATTTGCTTGGCCTGGAGCTTCTTCTTGGGCTCTCA |
| | | ATGGACGTAATAGCTTGATGAATCCTGGACCTGCTATGGCCAGCCACAAAGAAGGAGAG |
| | | GACCGTTTCTTTCCTTTGTCTGGATCTTTAATTTTTGGCAAACAAGGAACTGGAAGAGA |
| | | CAACGTGGATGCGGACAAAGTCATGATAACCAACGAAGAAGAAATTAAAACTACTAACC |
| | | CGGTAGCAACGGAGTCCTATGGACAAGTGGCCACAAACCACCAGAGTGCCCAAGCACAG |
| | | GCGCAGACCGGCTGGGTTCAAAACCAAGGAATACTTCCGGGTATGGTTTGGCAGGACAG |
| | | AGATGTGTACCTGCAAGGACCCATTTGGGCCAAAATTCCTCACACGGACGGCAACTTTC |
| | | ACCCTTCTCCGCTGATGGGAGGGTTTGGAATGAAGCACCCGCCTCCTCAGATCCTCATC |
| | | AAAAACACACCTGTACCTGCGGATCCTCCAACGGCCTTCAACAAGGACAAGCTGAACTC |
| | | TTTCATCACCCAGTATTCTACTGGCCAAGTCAGCGTGGAGATCGAGTGGGAGCTGCAGA |
| | | AGGAAAACAGCAAGCGCTGGAACCCGGAGATCCAGTACACTTCCAACTATTACAAGTCT |
| | | AATAATGTTGAATTTGCTGTTAATACTGAAGGTGTATATAGTGAACCCCGCCCCATTGG |
| | | CACCAGATACCTGACTCGTAATCTGTAA |
| VOY9P39 | 12 | MAADGYLPDWLEDNLSEGIREWWALKPGAPQPKANQQHQDNARGLVLPGYKYLGPGNGL |
| (amino acid) | | DKGEPVNAADAAALEHDKAYDQQLKAGDNPYLKYNHADAEFQERLKEDTSEGGNLGRAV |
| | | FQAKKRLLEPLGLVEEAAKTAPGKKRPVEQSPQEPDSSAGIGKSGAQPAKKRLNFGQTG |
| | | DTESVPDPQPIGEPPAAPSGVGSLTMASGGGAPVADNNEGADGVGSSSGNWHCDSQWLG |
| | | DRVITTSTRTWALPTYNNHLYKQISNSTSGGSSNDNAYFGYSTPWGYFDFNRFHCHFSP |
| | | RDWQRLINNNWGFRPKRLNFKLFNIQVKEVTDNNGVKTIANNLTSTVQVFTDSDYQLPY |
| | | VLGSAHEGCLPPFPADVFMIPQYGYLTLNDGSQAVGRSSFYCLEYFPSQMLRTGNNFQF |
| | | SYEFENVPFHSSYAHSQSLDRLMNPLIDQYLYYLSKTINGSGQNQQTLKFSVAGPSNMA |
| | | VQGRNYIPGPSYRQQRVSTTVTQNNNSEFAWPGASSWALNGRNSLMNPGPAMASHKEGE |
| | | DRFFPLSGSLIFGKQGTGRDNVDADKVMITNEEEIKTTNPVATESYGQVATNHQSDGTG |
| | | STTGWAQAQTGWVQNQGILPGMVWQDRDVYLQGPIWAKIPHTDGNFHPSPLMGGFGMKH |
| | | PPPQILIKNTPVPADPPTAFNKDKLNSFITQYSTGQVSVEIEWELQKENSKRWNPEIQY |
| | | TSNYYKSNNVEFAVNTEGVYSEPRPIGTRYLTRNL |
| VOY9P39 | 13 | ATGGCTGCCGATGGTTATCTTCCAGattqqcTCGAGGACAACCTTAGTGAAGGAATTCG |
| (DNA) | | CGAGTGGTGGGCTTTGAAACCTGGAGCCCCTCAACCCAAGGCAAATCAACAACATCAAG |
| | | ACAACGCTCGAGGTCTTGTGCTTCCGGGTTACAAATACCTTGGACCCGGCAACGGACTC |
| | | GACAAGGGGGAGCCGGTCAACGCAGCAGACGCGGCGGCCCTCGAGCACGACAAGGCCTA |
| | | CGACCAGCAGCTCAAGGCCGGAGACAACCCGTACCTCAAGTACAACCACGCCGACGCCG |
| | | AGTTCCAGGAGCGGCTCAAAGAAGATACGTCTTTTGGGGGCAACCTCGGGCGAGCAGTC |
| | | TTCCAGGCCAAAAAGAGGCTTCTTGAACCTCTTGGTCTGGTTGAGGAAGCGGCTAAGAC |
| | | GGCTCCTGGAAAGAAGAGGCCTGTAGAGCAGTCTCCTCAGGAACCGGACTCCTCCGCGG |
| | | GTATTGGCAAATCGGGTGCACAGCCCGCTAAAAAGAGACTCAATTTCGGTCAGACTGGC |
| | | GACACAGAGTCAGTCCCAGACCCTCAACCAATCGGAGAACCTCCCGCAGCCCCCTCAGG |
| | | TGTGGGATCTCTTACAATGGCTTCAGGTGGTGGCGCACCAGTGGCAGACAATAACGAAG |
| | | GTGCCGATGGAGTGGGTAGTTCCTCGGGAAATTGGCATTGCGATTCCCAATGGCTGGGG |
| | | GACAGAGTCATCACCACCAGCACCCGAACCTGGGCCCTGCCCACCTACAACAATCACCT |
| | | CTACAAGCAAATCTCCAACAGCACATCTGGAGGATCTTCAAATGACAACGCCTACTTCG |
| | | GCTACAGCACCCCCTGGGGGTATTTTGACTTCAACAGATTCCACTGCCACTTCTCACCA |
| | | CGTGACTGGCAGCGACTCATCAACAACAACTGGGGATTCCGGCCTAAGCGACTCAACTT |
| | | CAAGCTCTTCAACATTCAGGTCAAAGAGGTTACGGACAACAATGGAGTCAAGACCATCG |
| | | CCAATAACCTTACCAGCACGGTCCAGGTCTTCACGGACTCAGACTATCAGCTCCCGTAC |
| | | GTGCTCGGGTCGGCTCACGAGGGCTGCCTCCCGCCGTTCCCAGCGGACGTTTTCATGAT |
| | | TCCTCAGTACGGGTATCTGACGCTTAATGATGGAAGCCAGGCCGTGGGTCGTTCGTCCT |
| | | TTTACTGCCTGGAATATTTCCCGTCGCAAATGCTAAGAACGGGTAACAACTTCCAGTTC |
| | | AGCTACGAGTTTGAGAACGTACCTTTCCATAGCAGCTACGCTCACAGCCAAAGCCTGGA |
| | | CCGACTAATGAATCCACTCATCGACCAATACTTGTACTATCTCTCAAAGACTATTAACG |
| | | GTTCTGGACAGAATCAACAAACGCTAAAATTCAGTGTGGCCGGACCCAGCAACATGGCT |
| | | GTCCAGGGAAGAAACTACATACCTGGACCCAGCTACCGACAACAACGTGTCTCAACCAC |
| | | TGTGACTCAAAACAACAACAGCGAATTTGCTTGGCCTGGAGCTTCTTCTTGGGCTCTCA |
| | | ATGGACGTAATAGCTTGATGAATCCTGGACCTGCTATGGCCAGCCACAAAGAAGGAGAG |
| | | GACCGTTTCTTTCCTTTGTCTGGATCTTTAATTTTTGGCAAACAAGGAACTGGAAGAGA |
| | | CAACGTGGATGCGGACAAAGTCATGATAACCAACGAAGAAGAAATTAAAACTACTAACC |
| | | CGGTAGCAACGGAGTCCTATGGACAAGTGGCCACAAACCACCAGAGTGACGGAACAGGA |
| | | AGCACAACAGGATGGGCACAGGCGCAGACCGGCTGGGTTCAAAACCAAGGAATACTTCC |
| | | GGGTATGGTTTGGCAGGACAGAGATGTGTACCTGCAAGGACCCATTTGGGCCAAAATTC |
| | | CTCACACGGACGGCAACTTTCACCCTTCTCCGCTGATGGGAGGGTTTGGAATGAAGCAC |
| | | CCGCCTCCTCAGATCCTCATCAAAAACACACCTGTACCTGCCGATCCTCCAACGGCCTT |
| | | CAACAAGGACAAGCTGAACTCTTTCATCACCCAGTATTCTACTGGCCAAGTCAGCGTGG |
| | | AGATCGAGTGGGAGCTGCAGAAGGAAAACAGCAAGCGgTGGAACCCGGAGATCCAGTAC |
| | | ACTTCCAACTATTACAAGTCTAATAATGTTGAATTTGCTGTTAATACTGAAGGTGTATA |
| | | TAGTGAACCCCGCCCCATTGGCACCAGATACCTGACTCGTAATCTGTAA |
| VOY9P33 | 14 | MAADGYLPDWLEDNLSEGIREWWALKPGAPQPKANQQHQDNARGLVLPGYKYLGPGNGL |
| (amino acid) | | DKGEPVNAADAAALEHDKAYDQQLKAGDNPYLKYNHADAEFQERLKEDTSFGGNLGRAV |
| | | FQAKKRLLEPLGLVEEAAKTAPGKKRPVEQSPQEPDSSAGIGKSGAQPAKKRLNFGQTG |
| | | DTESVPDPQPIGEPPAAPSGVGSLTMASGGGAPVADNNEGADGVGSSSGNWHCDSQWLG |
| | | DRVITTSTRTWALPTYNNHLYKQISNSTSGGSSNDNAYFGYSTPWGYFDFNRFHCHFSP |
| | | RDWQRLINNNWGFRPKRLNFKLFNIQVKEVTDNNGVKTIANNLTSTVQVFTDSDYQLPY |
| | | VLGSAHEGCLPPFPADVFMIPQYGYLTLNDGSQAVGRSSFYCLEYFPSQMLRTGNNFQF |
| | | SYEFENVPFHSSYAHSQSLDRLMNPLIDQYLYYLSKTINGSGQNQQTLKFSVAGPSNMA |
| | | VQGRNYIPGPSYRQQRVSTTVTQNNNSEFAWPGASSWALNGRNSLMNPGPAMASHKEGE |
| | | DRFFPLSGSLIFGKQGTGRDNVDADKVMITNEEEIKTTNPVATESYGQVATNHQSDGTG |
| | | QVTGWAQAQTGWVQNQGILPGMVWQDRDVYLQGPIWAKIPHTDGNFHPSPLMGGFGMKH |
| | | PPPQILIKNTPVPADPPTAFNKDKLNSFITQYSTGQVSVEIEWELQKENSKRWNPEIQY |
| | | TSNYYKSNNVEFAVNTEGVYSEPRPIGTRYLTRNL |
| VOY9P33 | 15 | ATGGCTGCCGATGGTTATCTTCCAGattggcTCGAGGACAACCTTAGTGAAGGAATTCG |
| (DNA) | | CGAGTGGTGGGCTTTGAAACCTGGAGCCCCTCAACCCAAGGCAAATCAACAACATCAAG |
| | | ACAACGCTCGAGGTCTTGTGCTTCCGGGTTACAAATACCTTGGACCCGGCAACGGACTC |
| | | GACAAGGGGGAGCCGGTCAACGCAGCAGACGCGGCGGCCCTCGAGCACGACAAGGCCTA |
| | | CGACCAGCAGCTCAAGGCCGGAGACAACCCGTACCTCAAGTACAACCACGCCGACGCCG |
| | | AGTTCCAGGAGCGGCTCAAAGAAGATACGTCTTTTGGGGGCAACCTCGGGCGAGCAGTC |
| | | TTCCAGGCCAAAAAGAGGCTTCTTGAACCTCTTGGTCTGGTTGAGGAAGCGGCTAAGAC |
| | | GGCTCCTGGAAAGAAGAGGCCTGTAGAGCAGTCTCCTCAGGAACCGGACTCCTCCGCGG |
| | | GTATTGGCAAATCGGGTGCACAGCCCGCTAAAAAGAGACTCAATTTCGGTCAGACTGGC |
| | | GACACAGAGTCAGTCCCAGACCCTCAACCAATCGGAGAACCTCCCGCAGCCCCCTCAGG |
| | | TGTGGGATCTCTTACAATGGCTTCAGGTGGTGGCGCACCAGTGGCAGACAATAACGAAG |
| | | GTGCCGATGGAGTGGGTAGTTCCTCGGGAAATTGGCATTGCGATTCCCAATGGCTGGGG |
| | | GACAGAGTCATCACCACCAGCACCCGAACCTGGGCCCTGCCCACCTACAACAATCACCT |
| | | CTACAAGCAAATCTCCAACAGCACATCTGGAGGATCTTCAAATGACAACGCCTACTTCG |
| | | GCTACAGCACCCCCTGGGGGTATTTTGACTTCAACAGATTCCACTGCCACTTCTCACCA |
| | | CGTGACTGGCAGCGACTCATCAACAACAACTGGGGATTCCGGCCTAAGCGACTCAACTT |
| | | CAAGCTCTTCAACATTCAGGTCAAAGAGGTTACGGACAACAATGGAGTCAAGACCATCG |
| | | CCAATAACCTTACCAGCACGGTCCAGGTCTTCACGGACTCAGACTATCAGCTCCCGTAC |
| | | GTGCTCGGGTCGGCTCACGAGGGCTGCCTCCCGCCGTTCCCAGCGGACGTTTTCATGAT |
| | | TCCTCAGTACGGGTATCTGACGCTTAATGATGGAAGCCAGGCCGTGGGTCGTTCGTCCT |
| | | TTTACTGCCTGGAATATTTCCCGTCGCAAATGCTAAGAACGGGTAACAACTTCCAGTTC |
| | | AGCTACGAGTTTGAGAACGTACCTTTCCATAGCAGCTACGCTCACAGCCAAAGCCTGGA |
| | | CCGACTAATGAATCCACTCATCGACCAATACTTGTACTATCTCTCAAAGACTATTAACG |
| | | GTTCTGGACAGAATCAACAAACGCTAAAATTCAGTGTGGCCGGACCCAGCAACATGGCT |
| | | GTCCAGGGAAGAAACTACATACCTGGACCCAGCTACCGACAACAACGTGTCTCAACCAC |
| | | TGTGACTCAAAACAACAACAGCGAATTTGCTTGGCCTGGAGCTTCTTCTTGGGCTCTCA |
| | | ATGGACGTAATAGCTTGATGAATCCTGGACCTGCTATGGCCAGCCACAAAGAAGGAGAG |
| | | GACCGTTTCTTTCCTTTGTCTGGATCTTTAATTTTTGGCAAACAAGGAACTGGAAGAGA |
| | | CAACGTGGATGCGGACAAAGTCATGATAACCAACGAAGAAGAAATTAAAACTACTAACC |
| | | CGGTAGCAACGGAGTCCTATGGACAAGTGGCCACAAACCACCAGAGTGACGGAACAGGA |
| | | CAAGTCACAGGATGGGCACAGGCGCAGACCGGCTGGGTTCAAAACCAAGGAATACTTCC |
| | | GGGTATGGTTTGGCAGGACAGAGATGTGTACCTGCAAGGACCCATTTGGGCCAAAATTC |
| | | CTCACACGGACGGCAACTTTCACCCTTCTCCGCTGATGGGAGGGTTTGGAATGAAGCAC |
| | | CCGCCTCCTCAGATCCTCATCAAAAACACACCTGTACCTGCCGATCCTCCAACGGCCTT |
| | | CAACAAGGACAAGCTGAACTCTTTCATCACCCAGTATTCTACTGGCCAAGTCAGCGTGG |
| | | AGATCGAGTGGGAGCTGCAGAAGGAAAACAGCAAGCGgTGGAACCCGGAGATCCAGTAC |
| | | ACTTCCAACTATTACAAGTCTAATAATGTTGAATTTGCTGTTAATACTGAAGGTGTATA |
| | | TAGTGAACCCCGCCCCATTGGCACCAGATACCTGACTCGTAATCTGTAA |

[0897] In some embodiments, the AAV capsid polypeptide, e.g., the AAV capsid variant, comprises the amino acid sequence of SEQ ID NO: 138 or an amino acid sequence substantially identical (e.g., having at least 70%, 75%, 80%, 85%, 90%, 92%, 95%, 97%, 98%, or 99% sequence identity) thereto. In some embodiments the AAV capsid polypeptide, e.g., the AAV capsid variant, comprises an amino acid sequence comprising at least one, two, or three modifications but no more than 30, 20, or 10 modifications, e.g., substitutions, relative to the amino acid sequence of SEQ ID NO: 138. In some embodiments, the AAV capsid polypeptide, e.g., the AAV capsid variant, comprises an amino acid sequence encoded by the nucleotide sequence of SEQ ID NO: 137 or a nucleotide sequence substantially identical (e.g., having at least 70%, 75%, 80%, 85%, 90%, 92%, 95%, 97%, 98%, or 99% sequence identity) thereto. In some embodiments, the nucleotide sequence encoding the AAV capsid polypeptide, e.g., the AAV capsid variant, comprises the nucleotide sequence of SEQ ID NO: 137 or a nucleotide sequence substantially identical (e.g., having at least 70%, 75%, 80%, 85%, 90%, 92%, 95%, 97%, 98%, or 99% sequence identity) thereto. In some embodiments, the AAV capsid polypeptide, e.g., the AAV capsid variant, comprises substitution at position K449, e.g., a K449R substitution, numbered according to SEQ ID NO: 138.

[0898] In some embodiments, the AAV capsid polypeptide, e.g., the AAV capsid variant, comprises the amino acid sequence of SEQ ID NO: 12 or an amino acid sequence substantially identical (e.g., having at least 70%, 75%, 80%, 85%, 90%, 92%, 95%, 97%, 98%, or 99% sequence identity) thereto. In some embodiments the AAV capsid polypeptide, e.g., the AAV capsid variant, comprises an amino acid sequence comprising at least one, two, or three modifications but no more than 30, 20, or 10 modifications, e.g., substitutions, relative to the amino acid sequence of SEQ ID NO: 12. In some embodiments, the AAV capsid polypeptide, e.g., the AAV capsid variant, comprises an amino acid sequence encoded by the nucleotide sequence of SEQ ID NO: 13 or a nucleotide sequence substantially identical (e.g., having at least 70%, 75%, 80%, 85%, 90%, 92%, 95%, 97%, 98%, or 99% sequence identity) thereto.

[0899] In some embodiments, the AAV capsid variant, comprises the amino acid sequence of SEQ ID NO: 14 or an amino acid sequence substantially identical (e.g., having at least 70%, 75%, 80%, 85%, 90%, 92%, 95%, 97%, 98%, or 99% sequence identity) thereto. In some embodiments the AAV capsid polypeptide, e.g., the AAV capsid variant, comprises an amino acid sequence comprising at least one, two, or three modifications but no more than 30, 20, or 10 modifications, e.g., substitutions, relative to the amino acid sequence of SEQ ID NO: 14. In some embodiments, the AAV capsid polypeptide, e.g., the AAV capsid variant, comprises an amino acid sequence encoded by the nucleotide sequence of SEQ ID NO: 15 or a nucleotide sequence substantially identical (e.g., having at least 70%, 75%, 80%, 85%, 90%, 92%, 95%, 97%, 98%, or 99% sequence identity) thereto.

[0900] In some embodiments, the AAV capsid variant, comprises immediately subsequent to position 448, 449, 452, 453, 455, numbered relative to SEQ ID NO: 138 or corresponding to equivalent positions in any other AAV serotype (e.g., AAV1, AAV2, AAV3, AAV3b, AAV4, AAV5, AAV6, AAV7, AAV8, AAVrh8, AAVrh10, AAVrh32.33, AAVrh74, SEQ ID NO: 1, SEQ ID NO: 12-15, PHP.N, PHP.B, or an AAV serotype as provided in Table 6 of WO 2021/230987 (the contents of which are hereby incorporated by reference in their entirety)), at least 3, 4, 5, 6, 7, 8, 9, 10, 11, 12, or 13 consecutive amino acids of any of amino acid sequence provided in Tables 1A, 2A, 2B, 9-11, 15, and 16. In some embodiments, the at least 3, 4, 5, 6, 7, 8, 9, 10, 11, 12, or 13 consecutive amino acids of any of amino acid sequence provided in Tables 1A, 2A, 2B, 9-11, 15, and 16 replaces at least one, two, three, four, five, six, seven, eight, nine, ten, or all of positions K449, T450, I451, N452, G453, 5454, G455, Q456, N457, Q458, and/or Q459, numbered according to SEQ ID NO: 138 or corresponding to equivalent positions in any other AAV serotype (e.g., AAV1, AAV2, AAV3, AAV3b, AAV4, AAV5, AAV6, AAV7, AAV8, AAVrh8, AAVrh10, AAVrh32.33, AAVrh74, SEQ ID NO: 1, SEQ ID NO: 12, SEQ ID NO: 14, PHP.N, PHP.B, or an AAV serotype as provided in Table 6 of WO 2021/230987 (the contents of which are hereby incorporated by reference in their entirety). In some embodiments, the at least 3, 4, 5, 6, 7, 8, 9, 10, 11, 12, or 13 consecutive amino acids of any of amino acid sequence provided in Tables 1A, 2A, 2B, 9-11, 15, and 16 replaces positions S454, G455, or both positions S454 and G455, numbered according to SEQ ID NO: 138 or corresponding to equivalent positions in any other AAV serotype (e.g., AAV1, AAV2, AAV3, AAV3b, AAV4, AAV5, AAV6, AAV7, AAV8, AAVrh8, AAVrh10, AAVrh32.33, AAVrh74, SEQ ID NO: 1, SEQ ID NO: 12, SEQ ID NO: 14, PHP.N, PHP.B, or an AAV serotype as provided in Table 6 of WO 2021/230987 (the contents of which are hereby incorporated by reference in their entirety). In some embodiments, the AAV capsid variant comprises an amino acid other than the wild-type, e.g., native, amino acid, at one, two, three, four, five, six, seven, eight, nine or all of positions T450, I451, N452, G453, S454, G455, Q456, N457, Q458, and/or Q459, numbered according to SEQ ID NO: 138 or corresponding to equivalent positions in any other AAV serotype (e.g., AAV1, AAV2, AAV3, AAV3b, AAV4, AAV5, AAV6, AAV7, AAV8, AAVrh8, AAVrh10, AAVrh32.33, AAVrh74, SEQ ID NO: 1, SEQ ID NO: 12, SEQ ID NO: 14, PHP.N, PHP.B, or an AAV serotype as provided in Table 6 of WO 2021/230987 (the contents of which are hereby incorporated by reference in their entirety). In some embodiments, the AAV capsid variant comprises an amino acid other than the wild-type, e.g., native, amino acid, at position S454, G455, or both positions S454 and G455, numbered according to SEQ ID NO: 138 or corresponding to equivalent positions in any other AAV serotype (e.g., AAV1, AAV2, AAV3, AAV3b, AAV4, AAV5, AAV6, AAV7, AAV8, AAVrh8, AAVrh10, AAVrh32.33, AAVrh74, SEQ ID NO: 1, SEQ ID NO: 12, or SEQ ID NO: 14, PHP.N, PHP.B, or an AAV serotype as provided in Table 6 of WO 2021/230987 (the contents of which are hereby incorporated by reference in their entirety)). In some embodiments, the AAV capsid variant comprises a modification, e.g., substitution, at one, two, three, four, five, six, seven, eight, nine, ten or all of positions K449, T450, I451, N452, G453, S454, G455, Q456, N457, Q458, and/or Q459, numbered according to SEQ ID NO: 138 or corresponding to equivalent positions in any other AAV serotype (e.g., AAV1, AAV2, AAV3, AAV3b, AAV4, AAV5, AAV6, AAV7, AAV8, AAVrh8, AAVrh10, AAVrh32.33, AAVrh74, SEQ ID NO: 1, SEQ ID NO: 12, SEQ ID NO: 14, PHP.N, PHP.B, or an AAV serotype as provided in Table 6 of WO 2021/230987 (the contents of which are hereby incorporated by reference in their entirety). In some embodiments, the AAV capsid variant comprises a modification, e.g., substitution, at position S454, G455, or both positions S454 and G455, numbered according to SEQ ID NO: 138 or corresponding to equivalent positions in any other AAV serotype (e.g., AAV1, AAV2, AAV3, AAV3b, AAV4, AAV5, AAV6, AAV7, AAV8, AAVrh8, AAVrh10, AAVrh32.33, AAVrh74, SEQ ID NO: 1, SEQ ID NO: 12, SEQ ID NO: 14, PHP.N, PHP.B, or an AAV serotype as provided in Table 6 of WO 2021/230987 (the contents of which are hereby incorporated by reference in their entirety).

[0901] In some embodiments, an AAV capsid variant, e.g., an AAV capsid variant described herein (e.g., an AAV capsid variant comprising a peptide described herein). In some embodiments, an AAV capsid variant comprises a peptide as set forth in any of Tables 1A, 2A, 2B3, 9-11, 15, or 16.

TABLE 1A
Exemplary Peptide Sequences

| | SEQ | | SEQ | | SEQ | | SEQ |
|---|---|---|---|---|---|---|---|
| Peptide | ID | Peptide | ID | Peptide | ID | Peptide | ID |
| Sequence | NO: | Sequence | NO: | Sequence | NO: | Sequence | NO: |
| GSGSPHSKAQN | 200 | GSLHHDNHGQN | 385 | GSVFGVPSG | 570 | GSIAMTSHG | 755 |
| QQT | | QQT | | QNQQT | | QNQQT | |
| GHDSPHKSGQN | 201 | GIMARDSSGQN | 386 | GSGLPDRNL | 571 | GSPGVSPSG | 756 |
| QQT | | QQT | | QNQQT | | QNQQT | |
| GSGSPHARMQN | 202 | GVVHITNSGQN | 387 | GSGTHNSAIQ | 572 | GSGQNQQTG | 757 |
| QQT | | QQT | | NQQT | | SSSRV | |
| GSGSPHVKSQN | 203 | GSGQNQHSAPF | 388 | GSGMIIASMQ | 573 | GSGQHLPLL | 758 |
| QQT | | NQT | | NQQT | | GNQQT | |
| GQDSPHKSGQN | 204 | GSGQTSGLKQN | 389 | GGITWTDSG | 574 | GSDHSHRGG | 759 |
| QQT | | QQT | | QNQQT | | QNQQT | |
| GSGSPHASRQN | 205 | GSGQNQQTSLS | 390 | GSGQNQQAS | 575 | GSGIVTKLG | 760 |
| QQT | | NTA | | GRQQT | | QNQQT | |
| GSGSPHASRQN | 206 | GSGQNQAVHNK | 391 | GSGQNQQPH | 576 | GSGQDVTKT | 761 |
| KQT | | SQT | | LKSLT | | GNQQT | |
| GSGSPHVKIQNQ | 207 | GVHTHLPSGQN | 392 | GPPQHMTSG | 577 | GSGQNQQSH | 762 |
| QT | | QQT | | QNQQT | | GRIGT | |
| GSGSPHSKAKN | 208 | GHLTMHNSGQN | 393 | GSGQNQQAS | 578 | GSGQNQQIN | 763 |
| QQT | | HQT | | LPSRT | | HRSPT | |
| GSGSPHKKNQN | 209 | GSGSSSRPYQNQ | 394 | GSGQIVSTQT | 579 | GSGDDSRVG | 764 |
| QQT | | QT | | NQQT | | QNQQT | |
| GSGSPHVRMQN | 210 | GILLATPSGQNQ | 395 | GSGKGHSAG | 580 | GSGQSTLKRI | 765 |
| QQT | | QT | | QNQQT | | NQQT | |
| GSGSPHASRQK | 211 | GSGQNAGSIPN | 396 | GSGQNTRLQ | 581 | GSGSQHSKA | 766 |
| QQT | | QQT | | LGQQT | | QNQQT | |
| GHSSPHRSGQN | 212 | GSRDGHTVGQN | 397 | GSVGSRPVG | 582 | GSGQNQQHA | 767 |
| QQT | | QQT | | QNQQT | | SSNNT | |
| GMRTYHLSGQN | 213 | GSLLISTSGQNQ | 398 | GSSHTLALG | 583 | GSRTYQVSG | 768 |
| QQT | | QT | | QNQQT | | QNQQT | |
| GSGSPHTRGQN | 214 | GSGAMPSHGQN | 399 | GMYEYSQSG | 584 | GSGQNQGLL | 769 |
| QQT | | QQT | | QNQQT | | SSPQT | |
| GSGIIPVSSQNQ | 215 | GALVSPISGQNQ | 400 | GNGQNQQHS | 585 | GSGGGLQHN | 770 |
| QT | | QT | | ILHGT | | QNQQT | |
| GSEYGHKSGQN | 216 | GSLSSHGVGQN | 401 | GSGYNQPHL | 586 | GSGQNQQTT | 771 |
| QQT | | QQT | | QNQQT | | AATRM | |
| GRGQNVSSVHR | 217 | GSGQNQQASLA | 402 | GPLVNASSG | 587 | GSGQNQRAS | 772 |
| QQT | | MRT | | QNQQT | | ILVQT | |
| GSSHRFYGGQN | 218 | GPGLGSHSGQN | 403 | GSGQNQQVL | 588 | GSGQNLGLL | 773 |
| QQT | | QQT | | TTART | | GAQQT | |
| GYFVAAWSGQN | 219 | GHDSQHKSGQN | 404 | GSGQNQHSV | 589 | GSLDLGRSG | 774 |
| QQT | | QQT | | HNDQT | | QNQQT | |
| GSVLHSHAAQN | 220 | GSGLTLSATQN | 405 | GAGLIMHSG | 590 | GNSQVKVSG | 775 |
| QQT | | QQT | | QNQQT | | QNQQT | |
| GSGDLVVSTQN | 221 | GSGQVVAHVGN | 406 | GMGRHSASG | 591 | GSSGSHQYG | 776 |
| QQT | | QQT | | QNQQT | | QNQQT | |
| GSYGMAASGQN | 222 | GSGLRTMTTQN | 407 | GSHSQSGHG | 592 | GSGQNQQQR | 777 |
| QQT | | QQT | | QNQQT | | DGTLT | |
| GLNHFGASGQN | 223 | GSGQVGRLLQN | 408 | GSSTTIVSGQ | 593 | GRGQHVSVA | 778 |
| QQT | | QQT | | NHQT | | NNQQT | |
| GSTGSHSAGQN | 224 | GSGQLSHQSVN | 409 | GRHLVTASG | 594 | GDSSSRISGQ | 779 |
| QHT | | QQT | | QNQQT | | NQQT | |
| GLAGHTVSGQN | 225 | GSGDRYQTLQN | 410 | GSGQNQQHA | 595 | GSGQNQQHS | 780 |
| QQT | | QQT | | NLNQT | | LSSQT | |
| GIILGASSGQNQ | 226 | GSGQNQQLKSS | 411 | GSGSTHSKA | 596 | GSLMDVHRG | 781 |
| QT | | AQT | | QNQQT | | QNQQT | |
| GSGVSTYNIQNQ | 227 | GSGQNQYSIPVA | 412 | GSGQNKQML | 597 | GSIQYQSSGQ | 782 |
| QT | | QT | | SGNTT | | NQQT | |
| GSLVSVQTGQN | 228 | GSGERLHLTQN | 413 | GSGQVHNPT | 598 | GLGSKNPSG | 783 |
| QQT | | QQT | | QNQQT | | QNQQT | |
| GQSSPHRSGQN | 229 | GSGHNQQVRTA | 414 | GSGQNQQIP | 599 | GSGQLVLTL | 784 |
| QQT | | PNT | | HVHQT | | QNQQT | |
| GREYGHKSGQN | 230 | GGLSHVMSGQN | 415 | GSLHAGLSG | 600 | GSGQNQQTS | 785 |
| QQT | | QQT | | QNQQT | | QPLPG | |
| GHTLTLSSGQN | 231 | GSGQSHRDVLN | 416 | GPAQHGTSG | 601 | GSGQNQQNL | 786 |
| QQT | | QQT | | QNQQT | | GKLNT | |
| GSITLIPSGQNQ | 232 | GSGQNLAGRMD | 417 | GEKAVTSSG | 602 | GTTAHQPSG | 787 |
| QT | | QQT | | QNQQT | | QNQQT | |
| GSNGFTALGQN | 233 | GSGQNQQTNRG | 418 | GSGQNQQTM | 603 | GSGQNRAQI | 788 |
| QQT | | NPM | | ANGQR | | GTQQT | |
| GSGHSSHSVQN | 234 | GSGQSYQRDHN | 419 | GSGSPHSKD | 604 | GSGQYVHVS | 789 |
| QQT | | QQT | | QNQQT | | SNQQT | |
| GSGIPQRSGKNQ | 235 | GSLLSAGMGQN | 420 | GSFSMGYGG | 605 | GSGQNQQTA | 790 |
| QT | | QHT | | QNQQT | | HAFNI | |
| GSGDTLHMLQN | 236 | GSGQNQQTAIY | 421 | GSGTHLVSL | 606 | GSGQNQRTM | 791 |
| QQT | | RNI | | QNQQT | | VATQT | |
| GERHTVLSGQN | 237 | GSGQNQQTSGT | 422 | GSGQMQPHV | 607 | GSGQNPIRG | 792 |
| QQT | | TNC | | QNQQT | | AMQQT | |
| GSGMPQSHIQN | 238 | GMTSHSVSGQN | 423 | GSGQNQQVA | 608 | GSGYVITGS | 793 |
| QQT | | QQT | | GLNNT | | QNQQT | |
| GSGQLSGIGGNQ | 239 | GSSQSTGYQPN | 424 | GSSQNQQHD | 609 | GRGPKQSNI | 794 |
| QT | | QQT | | MRLRT | | QNQQT | |
| GSGQNRKPASF | 240 | GSLKPTTLGQN | 425 | GPASLPISGQ | 610 | GSGQNQQT | 795 |
| AQT | | QQT | | NQQT | | MLGKPC | |
| GSGSVSQLGQN | 241 | GRMFSLGSGQN | 426 | GSGQNQQPP | 611 | GSGQNQQVG | 796 |
| QQT | | QQT | | LATRT | | STVRT | |
| GSDFLGTHGQN | 242 | GSGQNQQTALG | 427 | GSSRVPVSG | 612 | GNVTTQKSG | 797 |
| QQT | | VKC | | QNQQT | | QNQQT | |
| GQIVQNPSGQN | 243 | GAMVSHSSGQN | 428 | GSGQNQQTN | 613 | GSGNPVSHL | 798 |
| QQT | | QQT | | LGHTT | | QNQQT | |
| GSGTQIPSQQNQ | 244 | GSGQNQQRNSD | 429 | GSGQNQQLV | 614 | GSLSHMESG | 799 |
| QT | | SVT | | SRVQT | | QNQQT | |
| GSGQNQQSARE | 245 | GSGQSMTLHLN | 430 | GPNSYPVSG | 615 | GRAPTNLSG | 800 |
| GLT | | QQT | | QKQQT | | QNQQT | |
| GSGLGMSTGQN | 246 | GSGQVHQAEVN | 431 | GHAHYQASG | 616 | GSGQNQQTV | 801 |
| QQT | | QQT | | QNQQT | | MTARA | |
| GSGLPVLSGQN | 247 | GSGQNQSQNHL | 432 | GSGQALLST | 617 | GSGMPASRL | 802 |
| QQT | | QQT | | GNQQT | | QNQQT | |
| GSGHSIRTDQNQ | 248 | GSLLTTASGQN | 433 | GSGQLPRQM | 618 | GVVRNHQSG | 803 |
| QT | | QQT | | TNQQT | | QNQQT | |
| GSGQSVQTVVN | 249 | GSGLIRTAAQNQ | 434 | GSGFPKSTEQ | 619 | GSGQNQHSV | 804 |
| QQT | | QT | | NQQT | | QVRQT | |
| GSGQNRAQSRF | 250 | GSGQNQQTVSR | 435 | GSRETSLSGQ | 620 | GSGQNTGHL | 805 |
| QQT | | QST | | NQQT | | TMQQT | |
| GGGDLGRSSQN | 251 | GSGQYANHGIN | 436 | GSGQNQQGT | 621 | GSGQNQQYA | 806 |
| QQT | | QQT | | GVSHT | | GKILT | |
| GGGTKMDSGQN | 252 | GSRSTGPSGQN | 437 | GSRTVPVYG | 622 | GSGNPHVRN | 807 |
| QQT | | QQT | | QNQQT | | QNQQT | |
| GSGSPHPSRQNQ | 253 | GRGVQQKLQQN | 438 | GSNAQSAHG | 623 | GSGQNGGSS | 808 |
| QT | | QQT | | QNQQT | | NRQQT | |
| GSGQITNAGMN | 254 | GSGQNQQVHLS | 439 | GAFHLAASG | 624 | GSGQRLSQG | 809 |
| QQT | | TGT | | QNQQT | | VNHQT | |
| GGRNGHTVGQN | 255 | GSGQNQQLSAK | 440 | GSGQYRSSS | 625 | GSGQNAHAK | 810 |
| QQT | | SST | | DNQQT | | EGQQT | |
| GSGFGPQTGQN | 256 | GSGYKAARPQN | 441 | GSGQVYISTP | 626 | GSSPAPNSG | 811 |
| QQT | | QQT | | NQQT | | QNQQT | |
| GRTDSHTSGQN | 257 | GSAGISPSGQNQ | 442 | GSGVSTQLL | 627 | GLAHKTSSG | 812 |
| QQT | | QT | | QNQQT | | QNQQT | |
| GYEVLGSSGQN | 258 | GSGQNRAHAFL | 443 | GSGQLGLSV | 628 | GSGQNQQTP | 813 |
| QQT | | QQT | | TNQQT | | GAHKT | |
| GSVHLSVTGQN | 259 | GSGLSGITMQN | 444 | GSGSNMRLS | 629 | GSGQNQQSL | 814 |
| QQT | | QQT | | QNQQT | | SGSFT | |
| GFMSYKGSGQN | 260 | GPGSAHSSGQN | 445 | GSGQNLHSG | 630 | GSGQNQQST | 815 |
| QQT | | QQT | | LPQQT | | GTSRT | |
| GNIAGSVSGQN | 261 | GSSHTQALGQN | 446 | GSSHTLALG | 631 | GSGQNQQTV | 816 |
| QQT | | QQT | | QNKQT | | QSNLV | |
| GSGSHRDVSQN | 262 | GSGVHGVSSQN | 447 | GSGQNQHSL | 632 | GSGQNQQLG | 817 |
| QQT | | QQT | | PAHRT | | SRQCT | |
| GGLGSMSSGQN | 263 | GSSGRDMGGQN | 448 | GSGQNQGTV | 633 | GSGQNQYLR | 818 |
| QQT | | QQT | | YPNQT | | LELQT | |
| GSGHLPQSAQN | 264 | GERAFPTSGQN | 449 | GSGQNQQPS | 634 | GSGQNQQTS | 819 |
| QQT | | QQT | | LRQST | | PRLQT | |
| GGVLVGGSGQN | 265 | GGRIVSLSGQNQ | 450 | GSGQNARLK | 635 | GSGQNQQTT | 820 |
| QQT | | QT | | DNQQT | | SSNMT | |
| GTHPYTSSGQN | 266 | GSGQNSYSHTS | 451 | GHAGSTGSG | 636 | GTASTYNSG | 821 |
| QQT | | QQT | | QNQQT | | QNQQT | |
| GSGQNQQLKEN | 267 | GLGYPGSSGQN | 452 | GSGQALSSSG | 637 | GSGQNQQT | 822 |
| RST | | QQT | | NQQT | | MPQHKI | |
| GSGQNQQTSPH | 268 | GSGPQSHTGQN | 453 | GSGASESHR | 638 | GSGQSHLHT | 823 |
| NHT | | QQT | | QNQQT | | GNQQT | |
| GSGTLYPQSQN | 269 | GSGQNQQLSRD | 454 | GVGVITSSGQ | 639 | GVKGVGHSG | 824 |
| QQT | | AST | | NQQT | | QNQQT | |
| GSGQNQQSNWI | 270 | GSGQILHSVPNQ | 455 | GSLYGQSLG | 640 | GSGKVTKQS | 825 |
| TKT | | QT | | QNQQT | | QNQQT | |
| GSGYTSLFLQNQ | 271 | GSGFHTDSRQN | 456 | GSGQMSDVH | 641 | GSGQNQQTA | 826 |
| QT | | QQT | | GNQQT | | LEKSL | |
| GSGVMTHVLQN | 272 | GSGQSHSLATN | 457 | GSGQNQQHS | 642 | GSGYKDTYG | 827 |
| QQT | | QQT | | SKATT | | QNQQT | |
| GSVSDVRAGQN | 273 | GSGQNQQTLSK | 458 | GSGQNQQTS | 643 | GSGQNQQSG | 828 |
| QQT | | PWT | | VSQQT | | TFLST | |
| GSGQSHMATLN | 274 | GSGHAAISQQN | 459 | GSGQKMWK | 644 | GSGQNTGQH | 829 |
| QQT | | QQT | | LDNQQT | | MMQQT | |
| GSGLSVHLAQN | 275 | GSGQNQQQIGG | 460 | GSGQNVSMQ | 645 | GSGKNQQRP | 830 |
| QQT | | NST | | VNQQT | | GLDQT | |
| GSGLSHATQQN | 276 | GGGPMAGSGQN | 461 | GSGQNQRAT | 646 | GSGQSREISL | 831 |
| QQT | | QQT | | LSNQT | | NQQT | |
| GSGLSVQSGQN | 277 | GMRMEYQSGQ | 462 | GSGQASSKS | 647 | GTPTSPSSGQ | 832 |
| QQT | | NQQT | | ANQQT | | NQQT | |
| GSGHMTYREKN | 278 | GSGQNQQGTLL | 463 | GSGKNQTPIP | 648 | GKPAGGLSG | 833 |
| QQT | | HQT | | KGQT | | QNQQT | |
| GSKGVPTPGQN | 279 | GSGQNQRSSGG | 464 | GSGQNQQTR | 649 | GSGQNHRSA | 834 |
| QQT | | VQT | | QEGST | | DMQQT | |
| GSGLLPLSSQNQ | 280 | GSGQNQRGALA | 465 | GASSLATSG | 650 | GSGQNQQTL | 835 |
| QT | | TQT | | QNQQT | | PSLSL | |
| GNGLYAVSGQN | 281 | GSGTVHAATQN | 466 | GSGQRGSLT | 651 | GSPYMGATG | 836 |
| QQT | | QQT | | ENQQT | | QNQQT | |
| GFNGSPSSGQNQ | 282 | GSRMTQQFGQN | 467 | GSEQTRQRG | 652 | GSGHAKAVG | 837 |
| QT | | QQT | | QNQQT | | QNQQT | |
| GSGQIRHSDQN | 283 | GSSSPGASGQN | 468 | GSGQNQQTL | 653 | GHMKGVTS | 838 |
| QQT | | QQT | | TASKE | | GQNQQT | |
| GGQVAPSSGQN | 284 | GHPSPHVSGQN | 469 | GSGTSGKTG | 654 | GSGQNQKIL | 839 |
| QQT | | QQT | | KNQQT | | TLDQT | |
| GSFSMHTHGQN | 285 | GSGSHHASRQN | 470 | GQLVTFTSG | 655 | GSGQNQQTK | 840 |
| QQT | | QQT | | QNQQT | | VGHSA | |
| GSGQNQQVIQG | 286 | GAVGHSYSGQN | 471 | GSGQNQQSA | 656 | GIARTTISGQ | 841 |
| SNT | | QQT | | NKILT | | NQQT | |
| GRVLHSHAGQN | 287 | GSRSQYDIGQN | 472 | GSGQNQQHH | 657 | GSGQNQQTS | 842 |
| QQT | | QQT | | SSHTT | | VGFRT | |
| GSGQNQQTSLQ | 288 | GSGQGPQERGN | 473 | GSGQNQKG | 658 | GSGQNQQT | 843 |
| DQT | | QQT | | MQPNQT | | MIANIR | |
| GSGLGRAPVQN | 289 | GSIAHVGTGQN | 474 | GSGQLVSGL | 659 | GDMTRSSSG | 844 |
| QQT | | QQT | | YNQQT | | QNQQT | |
| GNGFSSASGQN | 290 | GSGQNQQKQNH | 475 | GSSVGVPSG | 660 | GSGHMSDLR | 845 |
| QQT | | GNT | | QNQQT | | QNQQT | |
| GSGQMASRESN | 291 | GSGQNQQALGS | 476 | GSGQNQQW | 661 | GRGAVMAS | 846 |
| QQT | | QRT | | DSRRQT | | GQNQQT | |
| GPGLPNHSGQN | 292 | GSGAITHMPQN | 477 | GSEQTRQSG | 662 | GSGQNQQLS | 847 |
| QQT | | QQT | | QNQQT | | GKSVT | |
| GNIQWQGSGQN | 293 | GSGQRNPLLLN | 478 | GSGIGSHIPQ | 663 | GSHTLVVSG | 848 |
| QQT | | QQT | | NQQT | | QNQQT | |
| GMSAHMSSGQN | 294 | GSSGIPVSHQNQ | 479 | GSGQNQRLH | 664 | GSGPWSAGL | 849 |
| QQT | | QT | | GVDQT | | QNQQT | |
| GHSFVNRSGQN | 295 | GVHSLTPSGQN | 480 | GEVSRVLSG | 665 | GSGQHSPHA | 850 |
| QQT | | QQT | | QNQQT | | LNQQT | |
| GRAVMDHSGQ | 296 | GVIVLHGSGQN | 481 | GSGQNQQKV | 666 | GSGQNQQPN | 851 |
| NQQT | | QQT | | SPLLT | | SGSMT | |
| GALTVMQSGQN | 297 | GGTRVVDSGQN | 482 | GSGLALERS | 667 | GSGLAHLGG | 852 |
| QQT | | QQT | | QNQQT | | QNQQT | |
| GSGQRSPVLPNQ | 298 | GSGGVTYQSQN | 483 | GPDRIGSSGQ | 668 | GSSVRYEPK | 853 |
| QT | | QQT | | NQQT | | QNQQT | |
| GSGQNGHLSLK | 299 | GSGQNQAGHGP | 484 | GSGQNQDHQ | 669 | GSGQNQQAR | 854 |
| QQT | | GQT | | NKQQT | | PLELT | |
| GSLPRGTSDQN | 300 | GSGQLVTSGPN | 485 | GSGQNQQTA | 670 | GSGQPRSTGI | 855 |
| QQT | | QQT | | LYNNT | | NQQT | |
| GVAGSLVSGQN | 301 | GSGIAAQRTQN | 486 | GSGAVHLTA | 671 | GSGQNQAN | 856 |
| QQT | | QQT | | QNQQT | | WVKVQT | |
| GRGGIPQSGQN | 302 | GSTPAGVGGQN | 487 | GSLVSTQSG | 672 | GSGHLFQSG | 857 |
| QQT | | QQT | | QNQQT | | QNQQT | |
| GSGQYASSIPNQ | 303 | GSGQNQQTSTG | 488 | GSGVSARMV | 673 | GSGQNRGISI | 858 |
| QT | | VHS | | QNQQT | | SQQT | |
| GTDFGRQSSQN | 304 | GSGQIRQLVDN | 489 | GSGQTRMPL | 674 | GSGTHYDNR | 859 |
| QQT | | QQT | | ANQQT | | QNQQT | |
| GIFMQTPSGQNQ | 305 | GSLIGMQSGQN | 490 | GSGISSRNMQ | 675 | GSGQNQQTS | 860 |
| QT | | QQT | | NQQT | | TTPLP | |
| GSGQNQQTRLV | 306 | GSGQIKGKMDN | 491 | GSGEKVHSG | 676 | GSGQVHASQ | 861 |
| DLT | | QQT | | QNQQT | | VNQKT | |
| GTREMPLSGQN | 307 | GSGSDMSSWQN | 492 | GSGQNQQKL | 677 | GSSGHRESG | 862 |
| QQT | | QQT | | SSMST | | QNQQT | |
| GSRLVHVHGQN | 308 | GRGQNQQHTGL | 493 | GSGQNQQTG | 678 | GLSAEKSSG | 863 |
| QQT | | ATT | | QHMRV | | QNQQT | |
| GSGRLVPNGPN | 309 | GSGQNQQTLYS | 494 | GSGMIHTTA | 679 | GSGQEHRSL | 864 |
| QQT | | SNT | | QNQQT | | ANQQT | |
| GSGYLRESPQN | 310 | GSGQTQVLKSN | 495 | GSGQNWPAL | 680 | GSGQTVVRI | 865 |
| QQT | | QQT | | KGQQT | | ANQQT | |
| GARIQNASGQK | 311 | GSRTLSNVGQN | 496 | GASHMSISG | 681 | GSGQNVSSV | 866 |
| QQT | | QQT | | QNQQT | | HRQQT | |
| GLSNPMPSGQN | 312 | GSGVQHSLPQN | 497 | GSDQNQQLG | 682 | GSGASRMSI | 867 |
| QQT | | QQT | | YSKQT | | QNQQT | |
| GSTVQDTRGQN | 313 | GNYLHQASGQN | 498 | GIPSIRESGQ | 683 | GVAFIGSSGQ | 868 |
| QQT | | QQT | | NQQT | | NQQT | |
| GPFGMPSSGQN | 314 | GSGGTSVHQQN | 499 | GSGIPSVKFQ | 684 | GSGQNQQTV | 869 |
| QQT | | QQT | | NQQT | | PTRQT | |
| GSGQNHGVLSN | 315 | GMDHSRPSGQN | 500 | GSGQNQQTS | 685 | GSGQAAKSS | 870 |
| QQT | | QQT | | VSQNV | | QNQQT | |
| GSGYSMSQAQN | 316 | GSGQNQQSMGT | 501 | GSGQNQQIG | 686 | GSGQNQQVA | 871 |
| QQT | | FTT | | ESRMT | | IRTST | |
| GSGMLTHTLQN | 317 | GSGQNQQTPLR | 502 | GSGSSSMSFQ | 687 | GSVHMQNA | 872 |
| QQT | | PPT | | NQQT | | GQNQQT | |
| GRGSPHASRQN | 318 | GSGQNQHHSVS | 503 | GSGQKQERA | 688 | GSGMRQAG | 873 |
| QQT | | QQT | | VSKQT | | VQNQQT | |
| GLSWPSTSGQN | 319 | GSGQLRSLSTNQ | 504 | GCTTRLNSG | 689 | GSGQNQQVG | 874 |
| QQT | | QT | | QNQQT | | GKTVT | |
| GNSMERTSGQN | 320 | GSGSPRQLSQN | 505 | GSGQNQQIIS | 690 | GVHDMRVS | 875 |
| QQT | | QQT | | TKIT | | GQNQQT | |
| GSGMSPSTLQN | 321 | GSGQNQQTTAS | 506 | GSGQNQQKS | 691 | GSGQHVSVA | 876 |
| QQT | | SHT | | LNGNT | | NNQQT | |
| GSGHGQVLSQN | 322 | GRGQVVSTHQN | 507 | GSGIPAPRLQ | 692 | GSAAMSVRG | 877 |
| QQT | | QQT | | NQQT | | QNQQT | |
| GRGQIYSTGGN | 323 | GSAQVSMVGQN | 508 | GSGQIRESM | 693 | GVSRGGPSG | 878 |
| QQT | | QQT | | GNQQT | | QNQQT | |
| GVVAAHNSGQN | 324 | GSSTLVTIGKNQ | 509 | GSGQNSGVH | 694 | GSGQMVHTI | 879 |
| QQT | | QT | | FNQQT | | GNQQT | |
| GDSSLRHSGQN | 325 | GFAHQASSGQN | 510 | GSGQNIGHSL | 695 | GRGGSMAET | 880 |
| QQT | | QQT | | PQQT | | QNQQT | |
| GSLVSQGAGQN | 326 | GSGQPVLSISNQ | 511 | GSGERSISVQ | 696 | GSGHTNPTR | 881 |
| QQT | | QT | | NQQT | | QNQQT | |
| GSLLQAHSGQN | 327 | GSGQSHRSELN | 512 | GSGLKPNVL | 697 | GSGEAARYE | 882 |
| QQT | | QQT | | QNQQT | | QNQQT | |
| GSGHIYVGIQNQ | 328 | GSSVGSPIGQNQ | 513 | GSGQVAYAQ | 698 | GSGQNERHL | 883 |
| QT | | QT | | GNQQT | | VLQQT | |
| GHHTTVQSGQN | 329 | GSGMPIRNVQN | 514 | GSGQSSYGS | 699 | GSGQNQQSK | 884 |
| QQT | | QQT | | GNQQT | | QQVLT | |
| GSRQSKRNELN | 330 | GSSTRVDSGQN | 515 | GSGQNQAMT | 700 | GSGQARAHR | 885 |
| QQT | | QQT | | HGDQT | | GNQQT | |
| GSGQNQQHVSS | 331 | GSGQNQQTAMR | 516 | GSGQNQALV | 701 | GSGQNQQPL | 886 |
| PRT | | STT | | SMGQT | | DTSRT | |
| GSSKELLWGQN | 332 | GSGQNQQHSSS | 517 | GSGQNPSFM | 702 | GSGQNQQLA | 887 |
| QQT | | HLT | | RGQQT | | NMVTT | |
| GSLSTPSSGQNQ | 333 | GSRNGHAVGQN | 518 | GSGQNQQSH | 703 | GSGQMKDL | 888 |
| QT | | QQT | | LRTNT | | HRNQQT | |
| GSIGYAGQGQN | 334 | GLGAYQSSGQN | 519 | GYTRLETSG | 704 | GSGQNQHLS | 889 |
| QQT | | QQT | | QNQQT | | SFVQT | |
| GSGQNQRVSNS | 335 | GPGLSGHSGQN | 520 | GSGQSYDMR | 705 | GSGQNQQPS | 890 |
| QQT | | QQT | | GNQQT | | SRVTT | |
| GSGYASHVQQN | 336 | GSTGIVSSGQNQ | 521 | GSRTTQDIGQ | 706 | GSGQNQQLA | 891 |
| QQT | | QT | | NQQT | | ITLGT | |
| GSGEYSRSGQN | 337 | GSRTTQVIGQNQ | 522 | GSGHPYKAA | 707 | GSGQNQQTV | 892 |
| QQT | | QT | | QNQQT | | GNPAT | |
| GSVSTHSSGQN | 338 | GSGLLHRAQQN | 523 | GRLSNAHGG | 708 | GSGQNQGRA | 893 |
| QQT | | QQT | | QNQQT | | HPMQT | |
| GSGQNQHSLGN | 339 | GSGQNAQQAAA | 524 | GSGQNQRAV | 709 | GSGQLIASV | 894 |
| YQT | | QQT | | LNDQT | | VNQQT | |
| GSGGLDTRGQN | 340 | GSGQNQQSALR | 525 | GGSHTYGGG | 710 | GSSVRSLVG | 895 |
| QQT | | TQT | | QNQQT | | QNQQT | |
| GNILHATSGQN | 341 | GSGFLSDTRQN | 526 | GSSVNSMIG | 711 | GGAGSAHSG | 896 |
| QQT | | QQT | | QNQQT | | QNQQT | |
| GSGQSYTMTQN | 342 | GSGLLYHDQQN | 527 | GNSSMMGSG | 712 | GSDQNQQT | 897 |
| QQT | | QQT | | QNQQT | | MSSTRT | |
| GSGQNQHSAPN | 343 | GSGQNQHYSLH | 528 | GNRDRPSSG | 713 | GSGQNQQM | 898 |
| SQT | | KQT | | QNQQT | | AGAFRT | |
| GSGQNQQTMDH | 344 | GSGHSPLPQQN | 529 | GSGNMHASR | 714 | GSLGNLQRG | 899 |
| NRT | | QQT | | QNQQT | | QNQQT | |
| GSNGGVGTGQN | 345 | GNGHSMRPNQN | 530 | GFIFPKVSGQ | 715 | GSGPSISHGQ | 900 |
| QQT | | QQT | | NQQT | | NQQT | |
| GAGSIIPSGQNQ | 346 | GSGLKWSTLQN | 531 | GSGQNQQLK | 716 | GSGQNQQSS | 901 |
| QT | | QQT | | NSTST | | FNVQT | |
| GSGQTHGGQHN | 347 | GSGQMGRQAV | 532 | GSGQNQQSQ | 717 | GSGQNQQTG | 902 |
| QQT | | NQQT | | YMPRT | | QATHN | |
| GSNLSFQSGQN | 348 | GSGQNQQTSGV | 533 | GSGQRMADI | 718 | VSGSPHSKA | 903 |
| QQT | | LTL | | GNQQT | | QNQQT | |
| GATLQVHSGQN | 349 | GSGQNQQALHN | 534 | GSGQNQSHY | 719 | CSGSPHSKA | 904 |
| QQT | | PHT | | PSQQT | | QNQQT | |
| GSGFNQRSEQN | 350 | GSGQNQQVIPNS | 535 | GSDGKMHRG | 720 | GSGSPHRKA | 905 |
| QQT | | KT | | QNQQT | | QNQQT | |
| GSGSLRDFDQN | 351 | GSPLQDRVGQN | 536 | GSGSVGFIGQ | 721 | GRGSPHSKA | 906 |
| QQT | | QQT | | NQQT | | QNQQT | |
| GSGDSITGKQNQ | 352 | GSGQNQYSSTN | 537 | GLHGMTLSG | 722 | GSGSPHSKA | 907 |
| QT | | PQT | | QNQQT | | QNKQT | |
| GSGQDRNIVQN | 353 | GAMTVTISGQN | 538 | GSDQSKRGD | 723 | GSGSPHSKA | 908 |
| QQT | | QQT | | SNQQT | | QTQQT | |
| GSGLSHSHQQN | 354 | GSGQNQQLQTLI | 539 | GSLFLATGG | 724 | GSGSTHASR | 909 |
| QQT | | RT | | QNQQT | | QNQQT | |
| GSGQNQQTGMS | 355 | GSGLRQTSQQN | 540 | GSGQNQQPS | 725 | GSGSPHKYG | 910 |
| SVK | | QQT | | AFSKT | | QNQQT | |
| GSVTHGISGQNQ | 356 | GSGQNQQTGLR | 541 | GSGQLPQSG | 726 | GSGSPHKFG | 911 |
| QT | | QQT | | LNQQT | | QNQQT | |
| GVVAHQPSGQN | 357 | GSGQTRQMKDN | 542 | GSGSKQNAL | 727 | VSGSPHKFG | 912 |
| QQT | | QQT | | QNQQT | | QNQQT | |
| GSGPILGQLQNQ | 358 | GSGQNHGLQSG | 543 | GSGQRRELS | 728 | GSGSPHSKA | 913 |
| QT | | QQT | | QNQQT | | QNHQT | |
| GSGHVPNSGLN | 359 | GSGQSHRQPEN | 544 | GSGQREPKA | 729 | GSGSPHSKA | 914 |
| QQT | | QQT | | SNQQT | | QHQQT | |
| GDAGVRSSGQN | 360 | GSGQDRHIVQN | 545 | GSGQNQQHP | 730 | GSGSPHKTY | 915 |
| QQT | | QQT | | STQQT | | QNQQT | |
| GSGSQLMSLQN | 361 | GSGQNQQLPHS | 546 | GSQSTLGLG | 731 | VSGSPHASR | 916 |
| QQT | | NLT | | QNQQT | | QNQQT | |
| GSGLDYSQRQN | 362 | GSGQLSVPYDN | 547 | GSGQNQQMP | 732 | GSGSPHKFG | 917 |
| QQT | | QQT | | GLSST | | KNQQT | |
| GSGQSSGRLINK | 363 | GSGRNPQTQPL | 548 | GSGQNQQTV | 733 | GSGSPHASR | 918 |
| QT | | QQT | | GGKNL | | QNQHT | |
| GSSVSPSSGQNQ | 364 | GSGQPYSTGLN | 549 | GSSREFHSGQ | 734 | GSHSPHKSG | 919 |
| QT | | QQT | | NQQT | | QNQQT | |
| GSGQVVGLSGN | 365 | GSGQNQQTHGG | 550 | GSGQNQQTV | 735 | GSGQNQQRR | 920 |
| QQT | | LRD | | PSNLV | | MSPST | |
| GSNMGVPLGQN | 366 | GAYGMVSSGQN | 551 | GSGQNAYSS | 736 | GSGSPHSKP | 921 |
| QQT | | QQT | | QAQQT | | QNQQT | |
| GSFYPSSTGQNQ | 367 | GSGIQSSYSQNQ | 552 | GSGQNKDHS | 737 | GSGSPHKFG | 922 |
| QT | | QT | | TRRQT | | QKQQT | |
| GSGQNQQTRLT | 368 | GPRLSDQSGQN | 553 | GQLGSVGSG | 738 | VSGSPHGAR | 923 |
| DLT | | QQT | | QDQQT | | QNQQT | |
| GPTNGRSSGQN | 369 | GSGQNQQTHPS | 554 | GSGQHAAPG | 739 | GSGSPHSKA | 924 |
| QQT | | PCT | | HNQQT | | QKQQT | |
| GSGLLHGKLQN | 370 | GSGQSFQMHTN | 555 | GSGQNQQTS | 740 | GSHSPHKRG | 925 |
| QQT | | QQT | | QSPPT | | QNQQT | |
| GANMGHVSGQ | 371 | GSGQNQQTGNP | 556 | GSGNYRDHE | 741 | GSGQNRQRL | 926 |
| NQQT | | KHT | | QNQQT | | KGLET | |
| GSGQNQQSGRG | 372 | GFSSAVHSGQN | 557 | GSGQHSNQH | 742 | GSGSPHKLG | 927 |
| DLT | | QQT | | VNQQT | | QNQQT | |
| GSHGHYASGQK | 373 | GSGQNQQTSMS | 558 | GSGQTARNG | 743 | GSGSPHKTS | 928 |
| QQT | | NAT | | INQQT | | KNQQT | |
| GSGDLRISPQNQ | 374 | GSGQDMKQHH | 559 | GSGQNQQHY | 744 | GSGSPHKIGQ | 929 |
| QT | | NQQT | | GSQGT | | NQQT | |
| GSGMPVILGQN | 375 | GLRLSTPSGQNQ | 560 | GSGSPQASR | 745 | GSGQDSPHV | 930 |
| QQT | | QT | | QNQQT | | RNQQT | |
| GRGVITSSGQNH | 376 | GSGQNQQTSVY | 561 | GSGFSHSMG | 746 | GSGSPHKTS | 931 |
| QT | | MNT | | KNQQT | | QNQQT | |
| GSGHSVSGPQN | 377 | GSGQNQYSQSS | 562 | GSGQSHSLET | 747 | GSGSPHASR | 932 |
| QQT | | MQT | | NQQT | | KNQQT | |
| GSRNGHTVGRN | 378 | GSGQNQQSMAD | 563 | GTEQTRQSG | 748 | GSHSPHKSG | 933 |
| QQT | | HTT | | QNQQT | | QKQQT | |
| GAGVHMVSGQ | 379 | GWERSFVSGQN | 564 | GSGRHLASV | 749 | GSGSPHKTS | 934 |
| NQQT | | QQT | | QNQQT | | QKQQT | |
| GSGQNHRPSVL | 380 | GLLAGKSSGQN | 565 | GLGSKNHSG | 750 | GSGSPHVRG | 935 |
| QQT | | QQT | | QNQQT | | QNKQT | |
| GSGSPRDSIQNQ | 381 | GKSFVPQSGQN | 566 | GSGQNQQTS | 751 | GSGSPHKTT | 936 |
| QT | | QQT | | HFPSA | | QNQQT | |
| GSGQGIHSSVNQ | 382 | GSGQMQSAGSN | 567 | GSGQLSGTP | 752 | GSGPVRALR | 937 |
| QT | | QQT | | QNQQT | | QNQQT | |
| GSGQQLSITPNQ | 383 | GSDQNQRLTSS | 568 | GSGQNQQAP | 753 | GSGSPHVRG | 938 |
| QT | | MQT | | HKKET | | QKQQT | |
| GGYHSQTSGQN | 384 | GESRAVLSGQN | 569 | GSGQNQQTL | 754 | CSGSPHKTS | 939 |
| QQT | | QQT | | RGSLE | | QNQQT | |
| CSHSPHKSGQN | 940 | DAGSPHSKAQN | 1909 | GSGSPHASR | 2019 | GNDSPHKSV | 2129 |
| QQT | | QQ | | QNQQ | | QNQQ | |
| GHDSPHKSGQN | 1800 | GSGSPHSKGQN | 1910 | GSGSPHASR | 2020 | GHDSPHKSA | 2130 |
| QQ | | QQ | | QNKQ | | QNYQ | |
| GSGSPHSKAQN | 1801 | DGGSPHSKAQN | 1911 | GSGSPHVKIQ | 2021 | GSASPHSKA | 2131 |
| QQ | | QQ | | NQQ | | LNQQ | |
| GSGSPHSKAQN | 1802 | ASGSPHSKAHN | 1912 | GSGSPHSKA | 2022 | GHESPHKSA | 2132 |
| RH | | QQ | | KNQQ | | QNRQ | |
| GSGSPHSKVQN | 1803 | GSGSPHSKAQN | 1913 | GSGSPHKKN | 2023 | GQDSPHKIG | 2133 |
| QQ | | TY | | QNQQ | | QNQQ | |
| MSGSPHSKAQN | 1804 | GSGSPHSKSQN | 1914 | GSGSPHVRM | 2024 | GHDSPHKSG | 2134 |
| QQ | | QH | | QNQQ | | QNHL | |
| GRGSPHSKAQN | 1805 | GGGSPHSKAQD | 1915 | GSGSPHASR | 2025 | GHDSPHKSG | 2135 |
| QQ | | KQ | | QKQQ | | QYQH | |
| RNGSPHSKAQN | 1806 | GSGSPHSKAQN | 1916 | GHSSPHRSG | 2026 | GNDSPHKSV | 2136 |
| QQ | | HL | | QNQQ | | QNHQ | |
| GSGSPHSKARD | 1807 | GSGSPHSKAQIG | 1917 | GSGSPHTRG | 2027 | GHDSPHKSG | 2137 |
| QQ | | M | | QNQQ | | QNQW | |
| GSGSPHSKAPNL | 1808 | GSGSPHSKALN | 1918 | CSGSPHSKA | 2028 | GHDSPHKSV | 2138 |
| Q | | KQ | | QNQQ | | QNQH | |
| TSGSPHSKAQN | 1809 | GGGSPHSKAQN | 1919 | GSGSPHRKA | 2029 | GHDSPHKSG | 2139 |
| QQ | | PQ | | QNQQ | | QNQH | |
| GSGSPHSKAHV | 1810 | GTGSPHSKAPN | 1920 | GSGSPHSKA | 2030 | GHDSPHKSG | 2140 |
| RQ | | QL | | QNKQ | | QTRQ | |
| GSGSPHSKAPNQ | 1811 | GSGSPHSKAQL | 1921 | GSGSPHSKA | 2031 | GHDSPHKSG | 2141 |
| H | | QQ | | QTQQ | | QNLH | |
| ISGSPHSKAQNQ | 1812 | GGGSPHSKAQY | 1922 | CSGSPHKTSQ | 2032 | GHDSPHKSA | 2142 |
| Q | | QQ | | NQQ | | QNQE | |
| GPGSPHSKAHN | 1813 | GGGSPHSKAQH | 1923 | CSHSPHKSG | 2033 | GHDSPHKSG | 2143 |
| QQ | | QQ | | QNQQ | | QHLQ | |
| GSGSPHSKTQSQ | 1814 | GSGSPHSKAQR | 1924 | GQSSPHRSG | 2034 | GHDSPHKSR | 2144 |
| Q | | MS | | QNQQ | | LNQP | |
| ESGSPHSKAQN | 1815 | GSGSPHSKAQGI | 1925 | GRGSPHASR | 2035 | GQDSPHKSG | 2145 |
| QQ | | L | | QNQQ | | QNQD | |
| GSGSPHSKAQPA | 1816 | GSGSPHSKAQD | 1926 | GSGSPHASR | 2036 | GHDSPHKSG | 2146 |
| K | | RQ | | KNQQ | | RNQQ | |
| SSGSPHSKAQNQ | 1817 | GSGSPHSKARD | 1927 | GSGSPHASR | 2037 | GHDSPHKSG | 2147 |
| Q | | WQ | | QNQH | | QNLL | |
| GNGSPHSKAQN | 1818 | GSGSPHSKAQN | 1928 | GSGSPHKIG | 2038 | GHDSPHKSG | 2148 |
| QQ | | TH | | KNQQ | | QLVI | |
| GSGSPHSKSQTQ | 1819 | GSGSPHSKAQE | 1929 | GSGSPHKFG | 2039 | GHDSPHKSR | 2149 |
| Q | | RS | | QKQQ | | QSQQ | |
| ASGSPHSKAQN | 1820 | GSGSPHSKAQN | 1930 | GSGSPHKFG | 2040 | GHDSPHKSG | 2150 |
| QQ | | YQ | | QNQQ | | RTQE | |
| GSGSPHSKAQN | 1821 | GSGSPHSKAQR | 1931 | GSGSPHKIGQ | 2041 | GHDSPHKSV | 2151 |
| LA | | TC | | NQQ | | QTHQ | |
| GSGSPHSKSQNQ | 1822 | GSGSPHSKAQIG | 1932 | GSGSPHKLG | 2042 | GHDSPHKSG | 2152 |
| L | | H | | QNQQ | | QNQP | |
| NSGSPHSKAQN | 1823 | GSGSPHSKAQG | 1933 | GSGSPHKTSK | 2043 | GHDSPHKSG | 2153 |
| QQ | | AI | | NQQ | | QTQQ | |
| GSGSPHSKAQG | 1824 | GSGSPHSKAQV | 1934 | GSGSPHKTSQ | 2044 | GPDSPHKIGQ | 2154 |
| QQ | | PP | | KQQ | | NQQ | |
| VSGSPHSKAQN | 1825 | GSGSPHSKAQV | 1935 | GSGSPHKTSQ | 2045 | GHDSPHKSV | 2155 |
| QQ | | QQ | | NQQ | | QNQQ | |
| GSGSPHSKALNR | 1826 | GSGSPHSKALM | 1936 | GSGSPHKTT | 2046 | GHDSPHKSR | 2156 |
| Q | | RQ | | QNQQ | | QDQH | |
| LSGSPHSKAQN | 1827 | GSGSPHSKAQY | 1937 | GSGSPHKTY | 2047 | GPDSPHKSG | 2157 |
| QQ | | SV | | QNQQ | | QKQQ | |
| GSGSPHSKAHN | 1828 | GSGSPHSKVPNL | 1938 | GSGSPHKYG | 2048 | GHDSPHKSR | 2158 |
| QQ | | Q | | QNQQ | | QSQH | |
| GSGSPHSKTQN | 1829 | GSGSPHSKAQAI | 1939 | GSGSPHSKA | 2049 | GHDSPHKSV | 2159 |
| QQ | | T | | QHQQ | | QNQL | |
| GGGSPHSKAQT | 1830 | GSGSPHSKAQK | 1940 | GSGSPHSKD | 2050 | GYDSPHKSG | 2160 |
| QQ | | TL | | QNQQ | | QYQH | |
| GSGSPHSKAQNP | 1831 | GSGSPHSKAQN | 1941 | GSGSPHSKPQ | 2051 | GHDSPHKSR | 2161 |
| P | | QW | | NQQ | | QNQQ | |
| GSGSPHSKAQN | 1832 | GSGSPHSKAQL | 1942 | GSGSPHVRG | 2052 | GHDSPHKSW | 2162 |
| LQ | | HH | | QKQQ | | VRQQ | |
| GGGSPHSKAQN | 1833 | GSGSPHSKAQNI | 1943 | GSGSPHVRG | 2053 | GHESPHKSG | 2163 |
| QQ | | I | | QNKQ | | QNQH | |
| GSGSPHSKAQY | 1834 | MEGSPHSKAQN | 1944 | GSHSPHKRG | 2054 | GHDSPHKIG | 2164 |
| QQ | | QQ | | QNQQ | | HNQQ | |
| GGGSPHSKAQN | 1835 | GSGSPHSKAQG | 1945 | GSHSPHKSG | 2055 | GHDSPHKSN | 2165 |
| KQ | | HH | | QKQQ | | AWQQ | |
| GSGSPHSKAQD | 1836 | GSGSPHSKAQS | 1946 | GSHSPHKSG | 2056 | GHDSPHKSG | 2166 |
| QE | | KV | | QNQQ | | QSVP | |
| KSGSPHSKAQN | 1837 | GSGSPHSKAQLP | 1947 | VSGSPHASR | 2057 | GHESPHKSG | 2167 |
| QQ | | S | | QNQQ | | QNIQ | |
| GGGSPHSKAQN | 1838 | GSGSPHSKAIGK | 1948 | VSGSPHGAR | 2058 | GHDSPHKSV | 2168 |
| QL | | Q | | QNQQ | | QNHL | |
| GSGSPHSKAQN | 1839 | GGGSPHSKSQN | 1949 | VSGSPHKFG | 2059 | GHDSPHKIG | 2169 |
| HQ | | QQ | | QNQQ | | LDQQ | |
| GSGSPHSKAQD | 1840 | GSGSPHSKAQAI | 1950 | GSGSPHSKA | 2060 | ASGSPHSKA | 2170 |
| QQ | | H | | QYYV | | QHQQ | |
| GGGSPHSKSQN | 1841 | GSGSPHSKAQH | 1951 | GSGSPHSKLR | 2061 | GHDSPHKRG | 2171 |
| QL | | GL | | RQQ | | PDQQ | |
| GNGSPHSKAQN | 1842 | GSGSPHSKAQF | 1952 | GSGSPHSKA | 2062 | GMGSPHSKT | 2172 |
| KQ | | MC | | GCGQ | | QNQQ | |
| GSGSPHSKGHW | 1843 | VSGSPHSKAQG | 1953 | GSGSPHSRA | 2063 | GHDSPHKSG | 2173 |
| QQ | | QQ | | QNQQ | | ESQQ | |
| GSGSPHSKAPNQ | 1844 | GGGSPHSKAQN | 1954 | GSGSPHSKRL | 2064 | GHDSPHKHG | 2174 |
| Q | | QM | | RQQ | | QNHQ | |
| GSGSPHSKAQN | 1845 | GSGSPHSKAQH | 1955 | GSGSPHSLRR | 2065 | GTGSPHSKA | 2175 |
| QL | | LQ | | NQQ | | QNQL | |
| GSGSPHSKRPEQ | 1846 | ENGSPHSKAQN | 1956 | GSGSPHSRGR | 2066 | GHDSPHKSV | 2176 |
| Q | | QQ | | NQQ | | QNKQ | |
| GSGSPHSKAQRT | 1847 | GSGSPHSKTQN | 1957 | GSGSPHSSRR | 2067 | GQVSPHKSG | 2177 |
| M | | HQ | | NQQ | | QNQQ | |
| GNGSPHSKAQN | 1848 | GSGSPHSKAQP | 1958 | GSGSPHSKAF | 2068 | GHDSPHKSG | 2178 |
| QH | | AR | | RLQ | | QRQL | |
| HSGSPHSKAQN | 1849 | GSGSPHSKAQSL | 1959 | GSCSPHRKA | 2069 | GHDSPHKIG | 2179 |
| QQ | | Q | | QNQQ | | QNQL | |
| GGGSPHSKALN | 1850 | GSGSPHSKSQSQ | 1960 | GSGSPHFLRQ | 2070 | GHDSPHKSG | 2180 |
| QQ | | L | | NQQ | | QIIV | |
| GSGSPHSKALH | 1851 | GSASPHSKAHS | 1961 | GSGSPHSLRF | 2071 | GYDSPHKSG | 2181 |
| QH | | QQ | | NQQ | | QKQS | |
| GTGSPHSKAQN | 1852 | GSGSPHSKAQM | 1962 | GSGSPHSKW | 2072 | GNGSPHSKA | 2182 |
| HQ | | PS | | LLQQ | | QNQE | |
| GSGSPHSKAQH | 1853 | GSGSPHSKAQG | 1963 | GSGSPHSKRR | 2073 | GDDSPHKSV | 2183 |
| RI | | SL | | LQQ | | QNQQ | |
| GSGSPHSKAQYI | 1854 | GSGSPHSKSQN | 1964 | GSGSPHSKA | 2074 | GHDSPHKSV | 2184 |
| H | | QQ | | QRKL | | QSHQ | |
| GGGSPHSKAHN | 1855 | GNGSPHSKSQN | 1965 | GSGSPHSKAL | 2075 | GHDSPHKSG | 2185 |
| QQ | | QQ | | RRQ | | QFVV | |
| GSGSPHSKAQKF | 1856 | GSGSPHSKAQV | 1966 | GSGSPHSKA | 2076 | GHDSPHKSR | 2186 |
| E | | PA | | QRLR | | QNLQ | |
| ESGSPHSKAQN | 1857 | GNGSPHSKAQN | 1967 | GSGSPHSKA | 2077 | GHNSPHKSG | 2187 |
| HQ | | LQ | | QRRL | | QNQE | |
| GSGSPHSKAQFP | 1858 | GSGSPHSKAQD | 1968 | GSGSPHSKA | 2078 | GHDSPHKSG | 2188 |
| S | | KQ | | RRQQ | | QSQP | |
| PSGSPHSKAQNQ | 1859 | GSGSPHSKAHY | 1969 | GSGSPHSKA | 2079 | GHESPHKSG | 2189 |
| Q | | QQ | | RRLQ | | QNEQ | |
| GNGSPHSKAQN | 1860 | GSGSPHSKAQV | 1970 | GSGSPHSKSR | 2080 | GHDSPHKSG | 2190 |
| PL | | PS | | RQQ | | QNQL | |
| GGGSPHSKAQS | 1861 | GGGSPHSKAQN | 1971 | GLLSPHWKA | 2081 | GHDSPHKSA | 2191 |
| QQ | | HQ | | QNQQ | | QNLL | |
| GSGSPHSKAQAI | 1862 | GSGSPHSKARG | 1972 | GSGSPHSKA | 2082 | ASGSPHSKAI | 2192 |
| K | | EQ | | RLRQ | | NQQ | |
| GSGSPHSKGQN | 1863 | GGGSPHSKAQY | 1973 | GSGSPHSKAS | 2083 | GNGSPHKRG | 2193 |
| RQ | | QH | | KRQ | | QNQQ | |
| GSGSPHSKAQSQ | 1864 | GSGSPHSKAPG | 1974 | GSGSPHVRR | 2084 | GHDSPHKSG | 2194 |
| Q | | QQ | | QNQQ | | QSLQ | |
| GSVSPHGKAQN | 1865 | KNGSPHSKAQN | 1975 | GSGSPHSKA | 2085 | GHDSPHKSA | 2195 |
| QL | | QQ | | QLYR | | QNHQ | |
| ASGSPHSKAQN | 1866 | GSGSPHSKRLEQ | 1976 | GSGSPHSKA | 2086 | GHDSPHKSG | 2196 |
| QL | | Q | | QLTV | | RNRQ | |
| RSGSPHSKAQN | 1867 | GSGSPHSKAQN | 1977 | GHDSPHKRG | 2087 | GHDSPHKYG | 2197 |
| QQ | | QS | | QHRQ | | QNEQ | |
| GSGSPHSKAQY | 1868 | GSGSPHSKAQK | 1978 | GHDSPHKSG | 2088 | GNGSPHSKA | 2198 |
| QH | | VI | | QKQQ | | PNLQ | |
| GSGSPHTKAQN | 1869 | GSGSPHSKAQN | 1979 | GHDSPHKSG | 2089 | GHDSPHKSQ | 2199 |
| PQ | | ND | | LTQQ | | QNQQ | |
| GSGSPHSKGQNP | 1870 | GSGSPHSKAQS | 1980 | GDDSPHKSG | 2090 | GHDSPHKSV | 2200 |
| P | | VH | | RNQQ | | QSKQ | |
| GSGSPHSKAQH | 1871 | GSGSPHSKAQPL | 1981 | GHDSPHKSG | 2091 | GNDSPHKIG | 2201 |
| QL | | G | | LNQQ | | HNQQ | |
| GSGSPHSKAQSP | 1872 | KEGSPHSKAQN | 1982 | GHESPHKSA | 2092 | GGGSPHSKA | 2202 |
| P | | QQ | | QNHQ | | QDQQ | |
| GSGSPHSKAQA | 1873 | GSGSPHSKAHN | 1983 | GHDSPHKSA | 2093 | GQDSPHKSG | 2203 |
| KL | | QE | | QNQW | | QNPL | |
| GSGSPHSKTKSQ | 1874 | GSGSPHSKAQIQ | 1984 | GHDSPHKSG | 2094 | ASGSPHSKA | 2204 |
| Q | | Q | | QNTH | | QNHQ | |
| GSGSPHSKAQD | 1875 | GSGSPHSKAQV | 1985 | GHDSPHKSG | 2095 | GHDSPHKSG | 2205 |
| RP | | RN | | RRRQ | | RDQK | |
| GIGSPHSKAQNL | 1876 | GSGSPHSKAPSN | 1986 | GHDSPHKSA | 2096 | GHDSPHKSV | 2206 |
| G | | Q | | QNQQ | | HNQQ | |
| GSGSPHSKAQAF | 1877 | GSGSPHSKAQV | 1987 | GHDSPHKSG | 2097 | GHDSPHKSG | 2207 |
| H | | GH | | QYQQ | | QWKR | |
| GSGSPHSKAQK | 1878 | GSGSPHSKAQR | 1988 | GNYSPHKIG | 2098 | GSGSPHSKA | 2208 |
| QQ | | DI | | QNQQ | | ENRQ | |
| GSGSPHSKAQN | 1879 | GSGSPHSKAQM | 1989 | GHDSPHKSR | 2099 | GHDSPHKSG | 2209 |
| AQ | | PN | | QNDQ | | QSQQ | |
| WSGSPHSKAQN | 1880 | AIGSPHSKAQNQ | 1990 | GHDSPHKSG | 2100 | GHDSPHKSR | 2210 |
| QQ | | Q | | QIRQ | | QAQQ | |
| GSGSPHSKAHN | 1881 | GSGSPHSKARG | 1991 | GHDSPHKIG | 2101 | GHDSPHKSV | 2211 |
| QL | | LQ | | QNQH | | QNHQ | |
| GNGSPHSKAQN | 1882 | GSGSPHSKLQK | 1992 | GYDSPHKSG | 2102 | GHDSPHKSK | 2212 |
| HQ | | QQ | | QKQQ | | QNQQ | |
| GGGSPHSKAQN | 1883 | GSGSPHSKAPSL | 1993 | GHDSPHKSG | 2103 | GHDSPHKSA | 2213 |
| LQ | | Q | | QSVQ | | QNQL | |
| GSGSPHSKAQK | 1884 | GSGSPHSKAQR | 1994 | GHESPHKSG | 2104 | GHDSPHKSG | 2214 |
| LN | | DQ | | RSQQ | | QTQP | |
| GGGSPHSKSQN | 1885 | GSGSPHSKNRD | 1995 | GHDSPHKSG | 2105 | GHDSPHKLW | 2215 |
| QH | | QQ | | QNKL | | INQQ | |
| GSGSPHSKSQNV | 1886 | GSGSPHSKAQA | 1996 | GHDSPHKTG | 2100 | GPDSPHKSG | 2216 |
| Q | | KG | | QNQQ | | QNQQ | |
| GSGSPHSKAQA | 1887 | GSGSPHSKAQS | 1997 | GRGSPHKRG | 2107 | GHDSPHKSV | 2217 |
| QQ | | AH | | QNQQ | | QKQL | |
| DSGSPHSKAQN | 1888 | GNGSPHSKSQN | 1998 | GSGSPHTKA | 2108 | GHPSPHWKG | 2218 |
| QQ | | QH | | QNPP | | QNQQ | |
| ASGSPHSKAPNQ | 1889 | GSGSPHSKSQN | 1999 | GQDSPHKSG | 2109 | GHDSPHKSG | 2219 |
| Q | | HQ | | QHQQ | | RNQL | |
| GSGSPHSKAQTP | 1890 | RSGSPHSKAQD | 2000 | GHDSPHKSG | 2110 | GSGSPHSKV | 2220 |
| P | | QQ | | QIQH | | QDQQ | |
| IDGSPHSKAQNQ | 1891 | GSGSPHSKAQST | 2001 | GHDSPHKSG | 2111 | GHDSPHKMG | 2221 |
| Q | | M | | PRQQ | | RNQQ | |
| GSGSPHNKAQN | 1892 | GSGSPHSKAQR | 2002 | GHDSPHKSG | 2112 | GHDSPHKSGI | 2222 |
| HQ | | EM | | HTQQ | | SIQ | |
| GSGSPHSKAQPP | 1893 | GGGSPHSKSQN | 2003 | GHDSPHKSG | 2113 | GHDSPHKSV | 2223 |
| A | | RQ | | QRQH | | QNLQ | |
| GSGSPHSKAQER | 1894 | GSGSPHSKAQY | 2004 | GSGSPHTKA | 2114 | GHDSPHKMA | 2224 |
| P | | RA | | QNQQ | | HNQQ | |
| GSGSPHSKAQD | 1895 | GGGSPHSKAQR | 2005 | GHDSPHKSA | 2115 | GHDSPHKHG | 2225 |
| LQ | | QQ | | QSQQ | | QNQQ | |
| GGGSPHSKAQN | 1896 | GSGSPHSKNQW | 2006 | GHESPHKSG | 2116 | GHDSPHKSV | 2226 |
| PP | | QQ | | QNQQ | | QSQQ | |
| GSGSPHSKAQA | 1897 | GSGSPHSKAQR | 2007 | GHDSPHKSL | 2117 | GHDSPHKSG | 2227 |
| MH | | MN | | QNQQ | | QTVC | |
| GSGSPHSKALN | 1898 | GSGSPHAKAQN | 2008 | GHGSPHSKA | 2118 | GQDSPHKSG | 2228 |
| QQ | | HQ | | QNPQ | | QYQQ | |
| GSGSPHSKAQHP | 1899 | GSGSPHSKAGD | 2009 | GHDSPHKSG | 2119 | GHDSPHKSG | 2229 |
| S | | SQ | | RNQE | | QQIM | |
| GLGSPHSKSQN | 1900 | GSGSPHSKLKSQ | 2010 | GHDSPHKSG | 2120 | GHDSPHKSR | 2230 |
| QQ | | 0 | | QTQL | | QNEQ | |
| GTGSPHSKAQN | 1901 | GSGSPHSKAQKI | 2011 | GHDSPHKSE | 2121 | GHDSPHKSG | 2231 |
| QQ | | S | | KNQQ | | LNHQ | |
| GSGSPHSKAPGL | 1902 | GSGSPHSKAPS | 2012 | GRDSPHKSG | 2122 | GYDSPHKSG | 2232 |
| Q | | MQ | | QDQQ | | QNQQ | |
| GSGSPHSKAQGI | 1903 | GSGSPHSKASPR | 2013 | GHDSPHKTG | 2123 | GHDSPHKSG | 2233 |
| R | | Q | | HNQQ | | QNLQ | |
| GSGSPHSKAQAP | 1904 | GSGSPHSKRME | 2014 | GYDSPHKSG | 2124 | GHDSPHKSR | 2234 |
| A | | QQ | | QTQQ | | QDQQ | |
| GSGSPHSKSQSQ | 1905 | GSGSPHSKAQY | 2015 | GHESPHKSG | 2125 | GDDSPHKSG | 2235 |
| Q | | QN | | QTQQ | | QKQL | |
| GSGSPHSKAQIP | 1906 | GSGSPHARMQN | 2016 | GHDSPHKSG | 2126 | GSGSPHSKA | 2236 |
| P | | QQ | | QSKQ | | QNQA | |
| GSGSPHSKAQT | 1907 | GSGSPHVKSQN | 2017 | GHDSPHKTG | 2127 | GDDSPHKSG | 2237 |
| QL | | QQ | | QNQP | | HNQQ | |
| GSGSPHSKAQAP | 1908 | GQDSPHKSGQN | 2018 | GHDSPHKSG | 2128 | GHDSPHKSG | 2238 |
| S | | QQ | | QSPQ | | QMIH | |
| GHDSPHKSGRN | 2239 | GHDSPHKSVQN | 2240 | GHDSPHKSG | 2241 | TINGHDSPH | 2728 |
| HQ | | RQ | | QKMN | | KSRLNQP | |
| TINGSGSPHSKA | 2242 | TDRGSGSPHSK | 2404 | TINGSGSPHS | 2566 | TVDGHDSPH | 2729 |
| QNQQ | | AQNQQ | | KAQSTM | | KSGQKQQ | |
| TINGHDSPHKSG | 2243 | TINGSGSPHSKA | 2405 | TVNASGSPHS | 2567 | TINGQDSPH | 2730 |
| QNQQ | | QIPP | | KAQNQL | | KSGQNQD | |
| TIIGSGSPHSKAQ | 2244 | TVKGSGSPHSK | 2406 | TINGSGSPHS | 2568 | TIEGHDSPHK | 2731 |
| NRH | | AQDQQ | | KAQREM | | SGRNQQ | |
| TFPGSGSPHSKV | 2245 | NADGSGSPHSK | 2407 | TVHGSGSPHS | 2569 | TTNGHDSPH | 2732 |
| QNQQ | | AQNQQ | | KAQSQQ | | KSGQNLL | |
| TEKMSGSPHSK | 2246 | TDKVSGSPHSK | 2408 | TINGGGSPHS | 2570 | TINGHDSPH | 2733 |
| AQNQQ | | AQNQQ | | KSQNRQ | | KSGQLVI | |
| EINGRGSPHSKA | 2247 | TITGSGSPHSKA | 2409 | TINGSGSPHS | 2571 | TVNGHDSPH | 2734 |
| QNQQ | | QTQL | | KAQYRA | | KSRQSQQ | |
| TVNRNGSPHSK | 2248 | TINGSGSPHSKA | 2410 | TINGGGSPHS | 2572 | TINGHDSPH | 2735 |
| AQNQQ | | QAPS | | KAQRQQ | | KSGRTQE | |
| TVNGSGSPHSK | 2249 | NCVGSGSPHSK | 2411 | TEPMSGSPHS | 2573 | TINGHDSPH | 2736 |
| ARDQQ | | AQNQQ | | KAQNQQ | | KSVQTHQ | |
| TFNGSGSPHSKA | 2250 | TIRDAGSPHSKA | 2412 | TINGSGSPHS | 2574 | TSNGHDSPH | 2737 |
| PNLQ | | QNQQ | | KNQWQQ | | KSGQNQP | |
| TEKTSGSPHSKA | 2251 | TVKDSGSPHSK | 2413 | ETAGSGSPHS | 2575 | VINGHDSPH | 2738 |
| QNQQ | | AQNQQ | | KAQNQQ | | KSGQTQQ | |
| TINGSGSPHSKA | 2252 | NALGSGSPHSK | 2414 | TINGSGSPHS | 2576 | TINGPDSPHK | 2739 |
| HVRQ | | AQNQQ | | KAQRMN | | IGQNQQ | |
| TVNGSGSPHSK | 2253 | VINGSGSPHSKG | 2415 | NNLGSGSPHS | 2577 | AVNGHDSPH | 2740 |
| APNQH | | QNQQ | | KAQNQQ | | KSVQNQQ | |
| TEKISGSPHSKA | 2254 | TVNGGGSPHSK | 2416 | TINGSGSPHA | 2578 | TINGHDSPH | 2741 |
| QNQQ | | AQNQQ | | KAQNHQ | | KSRQDQH | |
| TINGPGSPHSKA | 2255 | TIQDGGSPHSKA | 2417 | TIIKNGSPHS | 2579 | AINGPDSPHK | 2742 |
| HNQQ | | QNQQ | | KAQNQQ | | SGQKQQ | |
| TVNGSGSPHSKT | 2256 | TISGGGSPHSKA | 2418 | TINGSGSPHS | 2580 | TINGHDSPH | 2743 |
| QSQQ | | QNQQ | | KAGDSQ | | KSRQSQH | |
| SINESGSPHSKA | 2257 | TSNASGSPHSKA | 2419 | TINGSGSPHS | 2581 | TIYGHDSPH | 2744 |
| QNQQ | | HNQQ | | KLKSQQ | | KSVQNQL | |
| TERTSGSPHSKA | 2258 | TINGSGSPHSKA | 2420 | TINGSGSPHS | 2582 | TVNGHDSPH | 2745 |
| QNQQ | | QNTY | | KAQKIS | | KSGQNLL | |
| TINGSGSPHSKA | 2259 | TINGSGSPHSKS | 2421 | TEYNSGSPHS | 2583 | TENKSGSPHS | 2746 |
| QPAK | | QNQH | | KAQNQQ | | KAQNQQ | |
| TEKSSGSPHSKA | 2260 | TINGGGSPHSKA | 2422 | TINGSGSPHS | 2584 | TTNGQDSPH | 2747 |
| QNQQ | | QDKQ | | KAPSMQ | | KSGQNQQ | |
| TSYGNGSPHSK | 2261 | TEFVSGSPHSKA | 2423 | AINGSGSPHS | 2585 | TDKGSGSPH | 2748 |
| AQNQQ | | QNQQ | | KAQNQQ | | SKAQNQQ | |
| TEKGSGSPHSKA | 2262 | TVNGSGSPHSK | 2424 | TINGSGSPHS | 2586 | TIDGHDSPH | 2749 |
| QNQQ | | AQNHL | | KASPRQ | | KSGRNQQ | |
| TINGSGSPHSKS | 2263 | TREISGSPHSKA | 2425 | TINGSGSPHS | 2587 | TINGYDSPH | 2750 |
| QTQQ | | QNQQ | | KRMEQQ | | KSGQYQH | |
| TERISGSPHSKA | 2264 | TINGSGSPHSKA | 2426 | TINGSGSPHS | 2588 | TDNGHDSPH | 2751 |
| QNQQ | | QIGM | | KAQYQN | | KSRQNQQ | |
| TERASGSPHSKA | 2265 | TIDGSGSPHSKA | 2427 | TINGSGSPHS | 2589 | TINGHDSPH | 2752 |
| QNQQ | | LNKQ | | KAQYYV | | KSWVRQQ | |
| ELHGSGSPHSKA | 2266 | TIIGGGSPHSKA | 2428 | TINGSGSPHS | 2590 | TINGHESPHK | 2753 |
| QNQQ | | QNPQ | | KLRRQQ | | SGQNQH | |
| AINGSGSPHSKA | 2267 | QGEGSGSPHSK | 2429 | TINGSGSPHS | 2591 | TVNGHDSPH | 2754 |
| QNLA | | AQNQQ | | KAGCGQ | | KIGHNQQ | |
| TVNGSGSPHSKS | 2268 | TINGTGSPHSKA | 2430 | SMNGSGSPH | 2592 | TCNGHDSPH | 2755 |
| QNQL | | PNQL | | SRAQNQQ | | KSGRNQQ | |
| TERNSGSPHSKA | 2269 | TVNGSGSPHSK | 2431 | TINGSGSPHS | 2593 | TINGNGSPHS | 2756 |
| QNQQ | | AQLQQ | | KRLRQQ | | KAQNHQ | |
| SVNGNGSPHSK | 2270 | TENGGGSPHSK | 2432 | TINGSGSPHS | 2594 | NVVGHDSPH | 2757 |
| AQNQQ | | AQYQQ | | LRRNQQ | | KSGQNQQ | |
| TFNGSGSPHSKA | 2271 | SINGSGSPHSKT | 2433 | TINGSGSPHS | 2595 | TINGHDSPH | 2758 |
| QGQQ | | QSQQ | | RGRNQQ | | KSNAWQQ | |
| TERVSGSPHSKA | 2272 | TVNGGGSPHSK | 2434 | TINGSGSPHS | 2596 | TDAGHDSPH | 2759 |
| QNQQ | | AQHQQ | | SRRNQQ | | KSGQNQQ | |
| TINGSGSPHSKA | 2273 | SEKGSGSPHSKA | 2435 | TINGSGSPHS | 2597 | TEVGHDSPH | 2760 |
| LNRQ | | QNQQ | | KAFRLQ | | KSGQNQQ | |
| TERLSGSPHSKA | 2274 | NVNGSGSPHSK | 2436 | TINGSCSPHR | 2598 | SELGHDSPH | 2761 |
| QNQQ | | AQNQQ | | KAQNQQ | | KSGQNQQ | |
| TDNGSGSPHSK | 2275 | GGEGSGSPHSK | 2437 | TINGSGSPHF | 2599 | TINGHDSPH | 2762 |
| AHNQQ | | AQNQQ | | LRQNQQ | | KSGQSVP | |
| TFHGSGSPHSKT | 2276 | TINGSGSPHSKA | 2438 | TINGSGSPHS | 2600 | TINGHESPHK | 2763 |
| QNQQ | | QRMS | | LRFNQQ | | SGQNIQ | |
| TINGGGSPHSKA | 2277 | TINGSGSPHSKA | 2439 | TINGSGSPHS | 2601 | TINGHDSPH | 2764 |
| QTQQ | | QGIL | | KWLLQQ | | KSVQNHL | |
| TSNGSGSPHSKA | 2278 | EFVGSGSPHSKA | 2440 | TINGSGSPHS | 2602 | TINGHDSPH | 2765 |
| QNPP | | QNQQ | | KRRLQQ | | KIGLDQQ | |
| TINGSGSPHSKA | 2279 | TIIGSGSPHSKAQ | 2441 | TINGSGSPHS | 2603 | TSNASGSPHS | 2766 |
| QNLQ | | DRQ | | KAQRKL | | KAQHQQ | |
| TVHGNGSPHSK | 2280 | SDKGSGSPHSK | 2442 | TINGSGSPHS | 2604 | TINGHDSPH | 2767 |
| AQNQQ | | AQNQQ | | KALRRQ | | KRGPDQQ | |
| TINGGGSPHSKA | 2281 | TEQVSGSPHSKA | 2443 | TINGSGSPHS | 2605 | TINGMGSPH | 2768 |
| QNQQ | | QNQQ | | KAQRLR | | SKTQNQQ | |
| TENMSGSPHSK | 2282 | TEHVSGSPHSKA | 2444 | YLSGSGSPHS | 2606 | TIKGHDSPH | 2769 |
| AQNQQ | | QNQQ | | KAQNQQ | | KSGESQQ | |
| TENVSGSPHSKA | 2283 | TINGSGSPHSKA | 2445 | TINGSGSPHS | 2607 | TINGHDSPH | 2770 |
| QNQQ | | RDWQ | | KAQRRL | | KHGQNHQ | |
| TSSGSGSPHSKA | 2284 | TENASGSPHSKA | 2446 | TINGSGSPHS | 2608 | TVNGTGSPH | 2771 |
| QYQQ | | QNQQ | | KARRQQ | | SKAQNQL | |
| TIDGGGSPHSKA | 2285 | EVQGSGSPHSK | 2447 | TINGSGSPHS | 2609 | TIIGHDSPHK | 2772 |
| QNKQ | | AQNQQ | | KARRLQ | | SGQYQH | |
| TEKVSGSPHSKA | 2286 | TINGSGSPHSKA | 2448 | TINGSGSPHS | 2610 | TSNGHDSPH | 2773 |
| QNQQ | | QNTH | | KSRRQQ | | KSVQNKQ | |
| AINGSGSPHSKA | 2287 | TINGSGSPHSKA | 2449 | TINGLLSPHW | 2611 | IVNGQVSPH | 2774 |
| QDQE | | PNLQ | | KAQNQQ | | KSGQNQQ | |
| TCNKSGSPHSKA | 2288 | TINGSGSPHSKA | 2450 | TINGSGSPHS | 2612 | TVNGHDSPH | 2775 |
| QNQQ | | QERS | | KARLRQ | | KSGQRQL | |
| TINGGGSPHSKA | 2289 | TSNGSGSPHSKA | 2451 | TINGSGSPHS | 2613 | TVNGHDSPH | 2776 |
| QNQL | | QNYQ | | KASKRQ | | KIGQNQL | |
| NINGGGSPHSKA | 2290 | TEYISGSPHSKA | 2452 | TINGSGSPHV | 2614 | TINGHDSPH | 2777 |
| QNQQ | | QNQQ | | RRQNQQ | | KSGQIIV | |
| TEHLSGSPHSKA | 2291 | TINGSGSPHSKA | 2453 | TINGSGSPHS | 2615 | IGNGHESPH | 2778 |
| QNQQ | | QRTC | | KAQLYR | | KSGQNQQ | |
| AEMGSGSPHSK | 2292 | TINGSGSPHSKA | 2454 | GLSGSGSPHS | 2616 | EVMGHDSPH | 2779 |
| AQNQQ | | QIGH | | KAQNQQ | | KSGQNQQ | |
| ATNGSGSPHSK | 2293 | NCWGSGSPHSK | 2455 | TINGSGSPHS | 2617 | TINGYDSPH | 2780 |
| AQNHQ | | AQNQQ | | KAQLTV | | KSGQKQS | |
| AIKGSGSPHSKA | 2294 | TINGSGSPHSKA | 2456 | TINGHDSPHK | 2618 | TIHGNGSPHS | 2781 |
| QDQQ | | QGAI | | RGQHRQ | | KAQNQE | |
| TINGGGSPHSKS | 2295 | TDVNSGSPHSK | 2457 | MPEGHDSPH | 2619 | YQVGHDSPH | 2782 |
| QNQL | | AQNQQ | | KSGQNQQ | | KSGQNQQ | |
| TVNGNGSPHSK | 2296 | SDIGSGSPHSKA | 2458 | MEGGHDSPH | 2620 | TIKGDDSPH | 2783 |
| AQNKQ | | QNQQ | | KSGQNQQ | | KSVQNQQ | |
| TINGSGSPHSKG | 2297 | TINGSGSPHSKA | 2459 | MEYGHDSPH | 2621 | TINGHDSPH | 2784 |
| HWQQ | | QVPP | | KSGQNQQ | | KSVQSHQ | |
| TDKTSGSPHSKA | 2298 | TINGSGSPHSKA | 2460 | AEWGHDSPH | 2622 | TINGHDSPH | 2785 |
| QNQQ | | QVQQ | | KSGQNQQ | | KSGQFVV | |
| TFKGSGSPHSKA | 2299 | TINGSGSPHSKA | 2461 | CEWGHDSPH | 2623 | TVNGHDSPH | 2786 |
| PNQQ | | LMRQ | | KSGQNQQ | | KSRQNLQ | |
| TVNGSGSPHSK | 2300 | TINGSGSPHSKA | 2462 | ANNGQDSPH | 2624 | ATNGHNSPH | 2787 |
| AQNQL | | QYSV | | KSGQNQQ | | KSGQNQE | |
| TINGSGSPHSKR | 2301 | NSIGSGSPHSKA | 2463 | IPEGHDSPHK | 2625 | AINGHDSPH | 2788 |
| PEQQ | | QNQQ | | SGQNQQ | | KSAQNQQ | |
| TINGSGSPHSKA | 2302 | TINGSGSPHSKV | 2464 | ADMGHDSPH | 2626 | TEHGHDSPH | 2789 |
| QRTM | | PNLQ | | KSGQNQQ | | KSGQNQQ | |
| TEKASGSPHSKA | 2303 | AINGSGSPHSKA | 2465 | IEYGHDSPHK | 2627 | TIY GHDSPH | 2790 |
| QNQQ | | QSQQ | | SGQNQQ | | KSGQSQP | |
| SDQGSGSPHSKA | 2304 | TINGSGSPHSKA | 2466 | ADYGHDSPH | 2628 | TISGHESPHK | 2791 |
| QNQQ | | QAIT | | KSGQNQQ | | SGQNEQ | |
| TEITSGSPHSKA | 2305 | TINGSGSPHSKA | 2467 | IETGHDSPHK | 2629 | AIIGHDSPHK | 2792 |
| QNQQ | | QKTL | | SGQNQQ | | SAQNQQ | |
| TDKSSGSPHSKA | 2306 | TVNGSGSPHSK | 2468 | MEWGHDSPH | 2630 | AIDGHDSPH | 2793 |
| QNQQ | | AQNQW | | KSGQNQQ | | KSGQNQL | |
| TIDGSGSPHSKA | 2307 | TINGSGSPHSKA | 2469 | CEYGHDSPH | 2631 | TIMGHDSPH | 2794 |
| QNQQ | | QLHH | | KSGQNQQ | | KSVQNQQ | |
| TVNGNGSPHSK | 2308 | TEQTSGSPHSKA | 2470 | RINGHDSPHK | 2632 | EVGGHDSPH | 2795 |
| AQNQH | | QNQQ | | SGQKQQ | | KSGQNQQ | |
| NTNGSGSPHSK | 2309 | TINGSGSPHSKA | 2471 | MEIGHDSPH | 2633 | TINGHDSPH | 2796 |
| AQNQQ | | QNII | | KSGQNQQ | | KSAQNLL | |
| TETHSGSPHSKA | 2310 | NSLGSGSPHSKA | 2472 | LEYGHDSPH | 2634 | TINASGSPHS | 2797 |
| QNQQ | | QNQQ | | KSGQNQQ | | KAINQQ | |
| TINGGGSPHSKA | 2311 | TIPMEGSPHSKA | 2473 | ADWGHDSPH | 2635 | AINGNGSPH | 2798 |
| LNQQ | | QNQQ | | KSGQNQQ | | KRGQNQQ | |
| TINGSGSPHSKA | 2312 | TINGSGSPHSKA | 2474 | IEIGHDSPHK | 2636 | SEMGHDSPH | 2799 |
| LHQH | | QGHH | | SGQNQQ | | KSGQNQQ | |
| TINGTGSPHSKA | 2313 | TDRTSGSPHSKA | 2475 | DIMGHDSPH | 2637 | AQQGHDSPH | 2800 |
| QNHQ | | QNQQ | | KSGQNQQ | | KSGQNQQ | |
| TINGSGSPHSKA | 2314 | TINGSGSPHSKA | 2476 | FEQGHDSPH | 2638 | AINGHDSPH | 2801 |
| QHRI | | QSKV | | KSGQNQQ | | KSGQSLQ | |
| TINGSGSPHSKA | 2315 | EVVGSGSPHSK | 2477 | MEFGHDSPH | 2639 | TINGSGSPHS | 2802 |
| QYIH | | AQNQQ | | KSGQNQQ | | KAPNQQ | |
| TENISGSPHSKA | 2316 | TINGSGSPHSKA | 2478 | CDQGHDSPH | 2640 | CGEGHDSPH | 2803 |
| QNQQ | | QLPS | | KSGQNQQ | | KSGQNQQ | |
| TIIGGGSPHSKA | 2317 | TINGSGSPHSKAI | 2479 | LPEGHDSPH | 2641 | TVNGHDSPH | 2804 |
| HNQQ | | GKQ | | KSGQNQQ | | KSAQNHQ | |
| TINGSGSPHSKA | 2318 | TEPTSGSPHSKA | 2480 | IENGHDSPHK | 2642 | TVNGHDSPH | 2805 |
| QKFE | | QNQQ | | SGQNQQ | | KSGQTQL | |
| TSNESGSPHSKA | 2319 | TVNGGGSPHSK | 2481 | MESGHDSPH | 2643 | TNNGHDSPH | 2806 |
| QNHQ | | SQNQQ | | KSGQNQQ | | KSGRNRQ | |
| TINGSGSPHSKA | 2320 | TINGSGSPHSKA | 2482 | AEIGHDSPHK | 2644 | TINGHDSPH | 2807 |
| QFPS | | QAIH | | SGQNQQ | | KYGQNEQ | |
| TERPSGSPHSKA | 2321 | TINGSGSPHSKA | 2483 | VEYGHDSPH | 2645 | TINGNGSPHS | 2808 |
| QNQQ | | QHGL | | KSGQNQQ | | KAPNLQ | |
| TINGNGSPHSKA | 2322 | SELGSGSPHSKA | 2484 | IINGHDSPHK | 2646 | SINGHDSPHK | 2809 |
| QNPL | | QNQQ | | SGLTQQ | | SQQNQQ | |
| SIKGNGSPHSKA | 2323 | TINGSGSPHSKA | 2485 | TSNGDDSPH | 2647 | TIGGHDSPH | 2810 |
| QNQQ | | QFMC | | KSGRNQQ | | KSGQNQQ | |
| TERMSGSPHSK | 2324 | TINVSGSPHSKA | 2486 | IEVGHDSPHK | 2648 | TINGHDSPH | 2811 |
| AQNQQ | | QGQQ | | SGQNQQ | | KSVQSKQ | |
| TERSSGSPHSKA | 2325 | TINGGGSPHSKA | 2487 | MEMGHDSPH | 2649 | ELVGHDSPH | 2812 |
| QNQQ | | QNQM | | KSGQNQQ | | KSGQNQQ | |
| TELHSGSPHSKA | 2326 | TVNGSGSPHSK | 2488 | AEVGHDSPH | 2650 | ELMGHDSPH | 2813 |
| QNQQ | | AQHLQ | | KSGQNQQ | | KSGQNQQ | |
| TELTSGSPHSKA | 2327 | TIRENGSPHSKA | 2489 | MDAGHDSPH | 2651 | TINGNDSPH | 2814 |
| QNQQ | | QNQQ | | KSGQNQQ | | KIGHNQQ | |
| TINGSGSPHSKA | 2328 | TINGSGSPHSKT | 2490 | VEWGHDSPH | 2652 | TIKGGGSPHS | 2815 |
| HNQQ | | QNHQ | | KSGQNQQ | | KAQDQQ | |
| TINGGGSPHSKA | 2329 | TINGSGSPHSKA | 2491 | AEQGHDSPH | 2653 | TVNGHDSPH | 2816 |
| QSQQ | | QPAR | | KSGQNQQ | | KSGQTQQ | |
| TINGSGSPHSKA | 2330 | TVNGSGSPHSK | 2492 | LEWGHDSPH | 2654 | TINGQDSPH | 2817 |
| QAIK | | AQSLQ | | KSGQNQQ | | KSGQNPL | |
| TENTSGSPHSKA | 2331 | TINGSGSPHSKS | 2493 | MELGHDSPH | 2655 | TVNASGSPH | 2818 |
| QNQQ | | QSQL | | KSGQNQQ | | SKAQNHQ | |
| TIDGSGSPHSKG | 2332 | TINGSASPHSKA | 2494 | METGHDSPH | 2656 | TINGHDSPH | 2819 |
| QNRQ | | HSQQ | | KSGQNQQ | | KSGRDQK | |
| NINGSGSPHSKA | 2333 | TWQNSGSPHSK | 2495 | MEAGHDSPH | 2657 | TINGHDSPH | 2820 |
| QSQQ | | AQNQQ | | KSGQNQQ | | KSVHNQQ | |
| TINGSVSPHGKA | 2334 | TINGSGSPHSKA | 2496 | IESGHDSPHK | 2658 | TINGHDSPH | 2821 |
| QNQL | | QDRQ | | SGQNQQ | | KSGQWKR | |
| TSNASGSPHSKA | 2335 | TINGSGSPHSKA | 2497 | MEVGHDSPH | 2659 | TIDGSGSPHS | 2822 |
| QNQL | | QMPS | | KSGQNQQ | | KAENRQ | |
| TEARSGSPHSKA | 2336 | TNNGGGSPHSK | 2498 | CEIGHDSPHK | 2660 | NEIGHDSPH | 2823 |
| QNQQ | | AQNLQ | | SGQNQQ | | KSGQNQQ | |
| TEKNSGSPHSKA | 2337 | TINGSGSPHSKA | 2499 | ATNGHDSPH | 2661 | AINGHDSPH | 2824 |
| QNQQ | | QGSL | | KSGLNQQ | | KSGQSQQ | |
| TANGSGSPHSK | 2338 | TEVTSGSPHSKA | 2500 | MDGGHDSPH | 2662 | IINGHDSPHK | 2825 |
| AQYQQ | | QNQQ | | KSGQNQQ | | SRQAQQ | |
| TVNGSGSPHSK | 2339 | SINGGGSPHSKA | 2501 | QEVGHDSPH | 2663 | TPNGHDSPH | 2826 |
| AQYQH | | QYQQ | | KSGQNQQ | | KSGQNQQ | |
| TINGSGSPHTKA | 2340 | TVIGSGSPHSKS | 2502 | ADQGHDSPH | 2664 | ITNGHDSPH | 2827 |
| QNPQ | | QNQQ | | KSGQNQQ | | KSGQTQQ | |
| TINGSGSPHSKG | 2341 | AVNVSGSPHSK | 2503 | TINGHESPHK | 2665 | TINGHDSPH | 2828 |
| QNPP | | AQNQQ | | SAQNHQ | | KSVQNHQ | |
| TIIGSGSPHSKAQ | 2342 | TVNGNGSPHSK | 2504 | TINGHDSPHK | 2666 | TINGHDSPH | 2829 |
| HQL | | SQNQQ | | SAQNQW | | KSKQNQQ | |
| TINGSGSPHSKA | 2343 | TDRNSGSPHSK | 2505 | NMNGHDSPH | 2667 | TINGHDSPH | 2830 |
| QSPP | | AQNQQ | | KSGQNTH | | KSAQNQL | |
| TIYGSGSPHSKA | 2344 | TINGSGSPHSKA | 2506 | IEMGHDSPH | 2668 | TVNGHDSPH | 2831 |
| QNQQ | | QVPA | | KSGQNQQ | | KSGQTQP | |
| TINGSGSPHSKA | 2345 | GVLGSGSPHSK | 2507 | TINGHDSPHK | 2669 | TDQGHDSPH | 2832 |
| QAKL | | AQNQQ | | SGRRRQ | | KSGQNQQ | |
| TDKNSGSPHSK | 2346 | TLNGNGSPHSK | 2508 | ISNGHDSPHK | 2670 | TINGHDSPH | 2833 |
| AQNQQ | | AQNLQ | | SAQNQQ | | KLWINQQ | |
| TINGSGSPHSKT | 2347 | AINGSGSPHSKA | 2509 | TGNGHDSPH | 2671 | GINGPDSPHK | 2834 |
| KSQQ | | QDKQ | | KSGQYQQ | | SGQNQQ | |
| TINGSGSPHSKA | 2348 | TSNGSGSPHSKA | 2510 | TINGNYSPHK | 2672 | SEIGHDSPHK | 2835 |
| QDRP | | HYQQ | | IGQNQQ | | SGQNQQ | |
| TINGIGSPHSKA | 2349 | TINGSGSPHSKA | 2511 | TINGHDSPHK | 2673 | TINGHDSPH | 2836 |
| QNLG | | QVPS | | SRQNDQ | | KSVQKQL | |
| TINGSGSPHSKA | 2350 | TELRSGSPHSKA | 2512 | QQQGHDSPH | 2674 | TINGHPSPH | 2837 |
| QSQQ | | QNQQ | | KSGQNQQ | | WKGQNQQ | |
| TENLSGSPHSKA | 2351 | NINGSGSPHSKA | 2513 | HDWGHDSPH | 2675 | TVNGHDSPH | 2838 |
| QNQQ | | QNHQ | | KSGQNQQ | | KSGRNQL | |
| TINGSGSPHSKA | 2352 | TVNGGGSPHSK | 2514 | IEGGHDSPHK | 2676 | TIKGSGSPHS | 2839 |
| QAFH | | AQNHQ | | SGQNQQ | | KVQDQQ | |
| TINGSGSPHSKA | 2353 | TINGSGSPHSKA | 2515 | TFNRSGSPHS | 2677 | SEKGHDSPH | 2840 |
| QKQQ | | RGEQ | | KAQNQQ | | KSGQNQQ | |
| TFSGSGSPHSKA | 2354 | TINGGGSPHSKA | 2516 | AINGHDSPH | 2678 | WSAGHDSPH | 2841 |
| QNLQ | | QYQH | | KSGQIRQ | | KSGQNQQ | |
| AINGSGSPHSKA | 2355 | TEDLSGSPHSKA | 2517 | TINGHDSPHK | 2679 | ELAGHDSPH | 2842 |
| QNAQ | | QNQQ | | IGQNQH | | KSGQNQQ | |
| TESWSGSPHSKA | 2356 | TINGSGSPHSKA | 2518 | AINGYDSPH | 2680 | TINGHDSPH | 2843 |
| QNQQ | | PGQQ | | KSGQKQQ | | KMGRNQQ | |
| TTNGSGSPHSKA | 2357 | TIPKNGSPHSKA | 2519 | TESGHDSPH | 2681 | TINGHDSPH | 2844 |
| HNQL | | QNQQ | | KSGQNQQ | | KSGISIQ | |
| TVNGNGSPHSK | 2358 | TINGSGSPHSKA | 2520 | TINGHDSPHK | 2682 | TSNGHDSPH | 2845 |
| AQNHQ | | QSLQ | | SGQSVQ | | KSVQNLQ | |
| TEDKSGSPHSKA | 2359 | TINGSGSPHSKR | 2521 | TINGHESPHK | 2683 | QTQGHDSPH | 2846 |
| QNQQ | | LEQQ | | SGRSQQ | | KSGQNQQ | |
| TESASGSPHSKA | 2360 | TERGSGSPHSKA | 2522 | TINGHDSPHK | 2684 | TINGHDSPH | 2847 |
| QNQQ | | QNQQ | | SGQNKL | | KMAHNQQ | |
| TNNGSGSPHSK | 2361 | TVNGSGSPHSK | 2523 | TINGHDSPHK | 2685 | AINGSGSPHS | 2848 |
| AQNQQ | | APNQQ | | TGQNQQ | | KAQTQQ | |
| TSNGGGSPHSK | 2362 | TSNGSGSPHSKA | 2524 | TINGRGSPHK | 2686 | TINGHDSPH | 2849 |
| AQNLQ | | QNQS | | RGQNQQ | | KHGQNQQ | |
| TDKMSGSPHSK | 2363 | TINGSGSPHSKA | 2525 | TINGSGSPHT | 2687 | GADGHDSPH | 2850 |
| AQNQQ | | QKVI | | KAQNPP | | KSGQNQQ | |
| EVHGSGSPHSK | 2364 | TEGISGSPHSKA | 2526 | TINGQDSPHK | 2688 | VGEGHDSPH | 2851 |
| AQNQQ | | QNQQ | | SGQHQQ | | KSGQNQQ | |
| TINGSGSPHSKA | 2365 | TINGSGSPHSKA | 2527 | SINGHDSPHK | 2689 | ANEGHDSPH | 2852 |
| QKLN | | QNND | | SGQIQH | | KSGQNQQ | |
| TINGGGSPHSKS | 2366 | TINGSGSPHSKA | 2528 | AINGHDSPH | 2690 | TEAKSGSPHS | 2853 |
| QNQH | | QSVH | | KSGPRQQ | | KAQNQQ | |
| TVNGGGSPHSK | 2367 | TINGSGSPHSKA | 2529 | TVNGHDSPH | 2691 | TINGHDSPH | 2854 |
| AQSQQ | | QPLG | | KSGHTQQ | | KSVQSQQ | |
| TTNGSGSPHSKA | 2368 | TINKEGSPHSKA | 2530 | SINGHDSPHK | 2692 | TIPGSGSPHS | 2855 |
| QYQH | | QNQQ | | SGQRQH | | KAQNLQ | |
| TISGSGSPHSKA | 2369 | TCNASGSPHSK | 2531 | SLNGSGSPHT | 2693 | TINGHDSPH | 2856 |
| QYQH | | AQNQQ | | KAQNQQ | | KSGQTVC | |
| TESTSGSPHSKA | 2370 | AINGSGSPHSKA | 2532 | AINGHDSPH | 2694 | ELRGHDSPH | 2857 |
| QNQQ | | HNQE | | KSAQSQQ | | KSGQNQQ | |
| TINGSGSPHSKS | 2371 | TEGLSGSPHSKA | 2533 | SIYGHESPHK | 2695 | CQIGHDSPH | 2858 |
| QNVQ | | QNQQ | | SGQNQQ | | KSGQNQQ | |
| SINGSGSPHSKA | 2372 | TRDASGSPHSK | 2534 | TVNGHDSPH | 2696 | GVMGHDSPH | 2859 |
| QAQQ | | AQNQQ | | KSLQNQQ | | KSGQNQQ | |
| TVNGSGSPHSK | 2373 | TSNGSGSPHSKA | 2535 | TINGHGSPHS | 2697 | ACDGHDSPH | 2860 |
| AQNLQ | | QNLQ | | KAQNPQ | | KSGQNQQ | |
| TVRDSGSPHSKA | 2374 | TGNGSGSPHSK | 2536 | TSNGYDSPH | 2698 | TINGQDSPH | 2861 |
| QNQQ | | AQIQQ | | KSGQKQQ | | KSGQYQQ | |
| TFNASGSPHSKA | 2375 | TVNGGGSPHSK | 2537 | TVNGHDSPH | 2699 | TINGHDSPH | 2862 |
| PNQQ | | AQNLQ | | KSGRNQE | | KSGQQIM | |
| TDRMSGSPHSK | 2376 | TDRSSGSPHSKA | 2538 | TTNGHDSPH | 2700 | TINGHDSPH | 2863 |
| AQNQQ | | QNQQ | | KSGQTQL | | KSRQNEQ | |
| TINGSGSPHSKA | 2377 | TINGSGSPHSKA | 2539 | AINGHDSPH | 2701 | ASNGHDSPH | 2864 |
| QTPP | | QVRN | | KSEKNQQ | | KSGLNHQ | |
| TIKGSGSPHSKA | 2378 | TINGSGSPHSKA | 2540 | IINGRDSPHK | 2702 | TVNGHDSPH | 2865 |
| QNQQ | | PSNQ | | SGQDQQ | | KSGQSQP | |
| NHIGSGSPHSKA | 2379 | TINGSGSPHSKA | 2541 | TISGHDSPHK | 2703 | NELGHDSPH | 2866 |
| QNQQ | | QVGH | | TGHNQQ | | KSGQNQQ | |
| TINGSGSPHSKA | 2380 | NAIGSGSPHSKA | 2542 | SINGYDSPHK | 2704 | AAEGHDSPH | 2867 |
| QYQH | | QNQQ | | SGQTQQ | | KSGQNQQ | |
| TIPIDGSPHSKAQ | 2381 | AENGSGSPHSK | 2543 | TINGHESPHK | 2705 | GQNGHDSPH | 2868 |
| NQQ | | AQNQQ | | SGQTQQ | | KSGQNQQ | |
| TINGSGSPHSKA | 2382 | TINGSGSPHSKA | 2544 | TINGHDSPHK | 2706 | NEFGHDSPH | 2869 |
| QGQQ | | QRDI | | SGQSKQ | | KSGQNQQ | |
| TFNGSGSPHNK | 2383 | TINGSGSPHSKA | 2545 | AIIGHESPHK | 2707 | TSIGYDSPHK | 2870 |
| AQNHQ | | QMPN | | SGQNQQ | | SGQNQQ | |
| ESDGSGSPHSKA | 2384 | TVNGSGSPHSKS | 2546 | TINGHDSPHK | 2708 | TDNGHDSPH | 2871 |
| QNQQ | | QNQQ | | TGQNQP | | KSGQNLQ | |
| TINGSGSPHSKA | 2385 | TIPAIGSPHSKAQ | 2547 | AINGHDSPH | 2709 | TITGHDSPHK | 2872 |
| QPPA | | NQQ | | KSGQSPQ | | SRQDQQ | |
| TINGSGSPHSKA | 2386 | TINGSGSPHSKA | 2548 | TIKGNDSPHK | 2710 | AEHGHDSPH | 2873 |
| QERP | | RGLQ | | SVQNQQ | | KSGQNQQ | |
| TIKGSGSPHSKA | 2387 | TELGSGSPHSKA | 2549 | TEFGHDSPH | 2711 | TINGDDSPH | 2874 |
| QDLQ | | QNQQ | | KSGQNQQ | | KSGQKQL | |
| TDLKSGSPHSKA | 2388 | AETGSGSPHSKA | 2550 | TINGHDSPHK | 2712 | EILGHDSPHK | 2875 |
| QNQQ | | QNQQ | | SAQNYQ | | SGQNQQ | |
| TINGGGSPHSKA | 2389 | TINGSGSPHSKL | 2551 | TFNGSASPHS | 2713 | TIHGSGSPHS | 2876 |
| QNPP | | QKQQ | | KALNQQ | | KAQNQA | |
| TINGSGSPHSKA | 2390 | TINGSGSPHSKA | 2552 | TINGHESPHK | 2714 | AINGDDSPH | 2877 |
| QAMH | | PSLQ | | SAQNRQ | | KSGHNQQ | |
| TVPNSGSPHSKA | 2391 | TINGSGSPHSKA | 2553 | TTNGHDSPH | 2715 | TSNGHNSPH | 2878 |
| QNQQ | | QRDQ | | KSGQNQQ | | KSGQNQE | |
| TVIGSGSPHSKA | 2392 | TDVGSGSPHSK | 2554 | TIKGQDSPHK | 2716 | TINGHDSPH | 2879 |
| LNQQ | | AQNQQ | | IGQNQQ | | KSGQMIH | |
| TINGSGSPHSKA | 2393 | TINGSGSPHSKN | 2555 | TVNGHDSPH | 2717 | NAIGHDSPH | 2880 |
| QHPS | | RDQQ | | KSGQNHL | | KSGQNQQ | |
| TINGLGSPHSKS | 2394 | SINGSGSPHSKA | 2556 | SINGHDSPHK | 2718 | VINGHDSPH | 2881 |
| QNQQ | | PNLQ | | SGQYQH | | KSGRNHQ | |
| TINGTGSPHSKA | 2395 | TINGSGSPHSKA | 2557 | TINGNDSPHK | 2719 | TITGHDSPHK | 2882 |
| QNQQ | | QAKG | | SVQNHQ | | SVQNRQ | |
| TINGSGSPHSKA | 2396 | TVNGSGSPHSK | 2558 | TITGHDSPHK | 2720 | TINGHDSPH | 2883 |
| PGLQ | | AQDKQ | | SGQNQW | | KSGQKMN | |
| TINGSGSPHSKA | 2397 | TINGGGSPHSKA | 2559 | TNNGHDSPH | 2721 | TIHGHDSPH | 2884 |
| QGIR | | QNPQ | | KSVQNQH | | KSGQSQQ | |
| TESHSGSPHSKA | 2398 | TINGSGSPHSKA | 2560 | TIDGHDSPHK | 2722 | TEIGHDSPHK | 2885 |
| QNQQ | | QSAH | | SGQNQH | | SGQNQQ | |
| TINGSGSPHSKA | 2399 | TINGNGSPHSKS | 2561 | TVNGHDSPH | 2723 | TINGHDSPH | 2886 |
| QAPA | | QNQH | | KSGQTRQ | | KSGQYQH | |
| TINGSGSPHSKS | 2400 | TVPTSGSPHSKA | 2562 | TVNGHDSPH | 2724 | NCLGSGSPH | 2403 |
| QSQQ | | QNQQ | | KSGQNLH | | SKAQNQQ | |
| AEHGSGSPHSK | 2401 | TIDGSGSPHSKS | 2563 | AISGHDSPHK | 2725 | AINRSGSPHS | 2565 |
| AQNQQ | | QNHQ | | SGLNQQ | | KAQDQQ | |
| TEDRSGSPHSKA | 2402 | TDVKSGSPHSK | 2564 | AINGHDSPH | 2726 | TITGHDSPHK | 2727 |
| QNQQ | | AQNQQ | | KSAQNQE | | SGQHLQ | |
| GSGSPHSKAQN | 2887 | GSGSPHSKAQS | 2936 | GSGSPHSKA | 2985 | GSGSPHSKA | 3034 |
| RHT | | QQT | | QRMST | | QNNDQ | |
| GSGSPHSKVQN | 2888 | ASGSPHSKAQN | 2937 | GSGSPHSKA | 2986 | GSGSPHSKA | 3035 |
| QQT | | QLT | | QGILT | | QSVHT | |
| MSGSPHSKAQN | 2889 | RSGSPHSKAQN | 2938 | GSGSPHSKA | 2987 | GSGSPHSKA | 3036 |
| QQT | | QQT | | QDRQT | | QPLGT | |
| GSGSPHSKARD | 2890 | GSGSPHSKAQY | 2939 | GSGSPHSKA | 2988 | GSGSPHSKA | 3037 |
| QQT | | QHT | | RDWQT | | HNQET | |
| GSGSPHSKAPNL | 2891 | GSGSPHTKAQN | 2940 | GSGSPHSKA | 2989 | GSGSPHSKA | 3038 |
| QT | | PQS | | QNTHD | | QNLQI | |
| TSGSPHSKAQN | 2892 | GSGSPHSKGQN | 2941 | GSGSPHSKAP | 2990 | GSGSPHSKA | 3039 |
| QQT | | PPT | | NLQI | | QIQQT | |
| GSGSPHSKAHV | 2893 | GSGSPHSKAQH | 2942 | GSGSPHSKA | 2991 | GSGSPHSKA | 3040 |
| RQT | | QLT | | QERST | | QVRNT | |
| GSGSPHSKAPNQ | 2894 | GSGSPHSKAQSP | 2943 | GSGSPHSKA | 2992 | GSGSPHSKA | 3041 |
| HT | | PT | | QNYQT | | PSNQT | |
| ISGSPHSKAQNQ | 2895 | GSGSPHSKAQA | 2944 | GSGSPHSKA | 2993 | GSGSPHSKA | 3042 |
| QT | | KLT | | QRTCT | | QVGHT | |
| GSGSPHSKTQSQ | 2896 | GSGSPHSKTKSQ | 2945 | GSGSPHSKA | 2994 | GSGSPHSKA | 3043 |
| QT | | QT | | QIGHT | | QRDIT | |
| GSGSPHSKAQN | 3032 | GSGSPHSKAQD | 2946 | GSGSPHSKA | 2995 | GSGSPHSKA | 3044 |
| QST | | RPT | | QGAIT | | QMPNT | |
| ESGSPHSKAQN | 2898 | GSGSPHSKAQS | 2947 | GSGSPHSKA | 2996 | GSGSPHSKA | 3045 |
| QQI | | QQL | | QVPPT | | RGLQT | |
| GSGSPHSKAQPA | 2899 | GSGSPHSKAQA | 2948 | GSGSPHSKA | 2997 | GSGSPHSKL | 3046 |
| KT | | FHT | | QVQQI | | QKQQT | |
| SSGSPHSKAQNQ | 2900 | GSGSPHSKAQK | 2949 | GSGSPHSKAL | 2998 | GSGSPHSKA | 3047 |
| QT | | QQD | | MRQT | | PSLQT | |
| GSGSPHSKSQTQ | 2901 | GSGSPHSKAQN | 2950 | GSGSPHSKA | 2999 | GSGSPHSKA | 3048 |
| QN | | AQT | | QYSVT | | QRDQT | |
| ASGSPHSKAQN | 2902 | WSGSPHSKAQN | 2951 | GSGSPHSKVP | 3000 | GSGSPHSKN | 3049 |
| QQT | | QQT | | NLQT | | RDQQT | |
| GSGSPHSKAQN | 2903 | GSGSPHSKAHN | 2952 | GSGSPHSKA | 3001 | GSGSPHSKA | 3050 |
| LAT | | QLT | | QSQQI | | QAKGT | |
| GSGSPHSKSQNQ | 2904 | GSGSPHSKAQN | 2953 | GSGSPHSKA | 3002 | GSGSPHSKA | 3051 |
| LT | | QQY | | QAITT | | QSAHT | |
| NSGSPHSKAQN | 2905 | GSGSPHSKAQK | 2954 | GSGSPHSKA | 3003 | GSGSPHSKS | 3052 |
| QQT | | LNT | | QKTLT | | QNHQT | |
| GSGSPHSKAQG | 2906 | GSGSPHSKSQN | 2955 | GSGSPHSKA | 3004 | RSGSPHSKA | 3053 |
| QQT | | VQT | | QNQWT | | QDQQT | |
| VSGSPHSKAQN | 2907 | GSGSPHSKAQA | 2956 | GSGSPHSKA | 3005 | GSGSPHSKA | 3054 |
| QQT | | QQT | | QLHHT | | QSTMT | |
| GSGSPHSKALNR | 2908 | GSGSPHSKAQN | 2957 | GSGSPHSKA | 3006 | GSGSPHSKA | 3055 |
| QS | | LQA | | QNIII | | QREMT | |
| LSGSPHSKAQN | 2909 | DSGSPHSKAQN | 2958 | GSGSPHSKA | 3007 | GSGSPHSKA | 3056 |
| QQT | | QQT | | QGHHT | | QYRAT | |
| GSGSPHSKAHN | 2910 | ASGSPHSKAPN | 2959 | GSGSPHSKA | 3008 | GSGSPHSKN | 3057 |
| QQT | | QQT | | QSKVT | | QWQQT | |
| GSGSPHSKTQN | 2911 | GSGSPHSKAQTP | 2960 | GSGSPHSKA | 3009 | GSGSPHSKA | 3058 |
| QQT | | PT | | QLPST | | QRMNT | |
| GSGSPHSKAQNP | 2912 | GSGSPHSKAQY | 2961 | GSGSPHSKAI | 3010 | GSGSPHAKA | 3059 |
| PT | | QHA | | GKQT | | QNHQT | |
| GSGSPHSKAQN | 2913 | GSGSPHSKAQG | 2962 | GSGSPHSKA | 3011 | GSGSPHSKA | 3060 |
| LQT | | QQA | | QAIHT | | GDSQT | |
| GSGSPHSKAQY | 2914 | GSGSPHNKAQN | 2963 | GSGSPHSKA | 3012 | GSGSPHSKL | 3061 |
| QQT | | HQT | | QHGLT | | KSQQT | |
| GSGSPHSKAQD | 2915 | GSGSPHSKAQPP | 2964 | GSGSPHSKA | 3013 | GSGSPHSKA | 3062 |
| QET | | AT | | QFMCT | | QKIST | |
| KSGSPHSKAQN | 2916 | GSGSPHSKAQE | 2965 | VSGSPHSKA | 3014 | GSGSPHSKA | 3063 |
| QQT | | RPT | | QGQQT | | PSMQT | |
| GSGSPHSKAQN | 2917 | GSGSPHSKAQD | 2966 | GSGSPHSKA | 3015 | GSGSPHSKA | 3064 |
| HQT | | LQT | | QHLQT | | SPRQT | |
| GSGSPHSKAQD | 2918 | GSGSPHSKAQA | 2967 | GSGSPHSKTQ | 3016 | GSGSPHSKR | 3065 |
| QQT | | MHT | | NH?N | | MEQQT | |
| GSGSPHSKGHW | 2919 | GSGSPHSKALN | 2968 | GSGSPHSKA | 3017 | GSGSPHSKA | 3066 |
| QQT | | QQT | | QPART | | QYQNT | |
| GSGSPHSKAPNQ | 2920 | GSGSPHSKAQH | 2969 | GSGSPHSKA | 3018 | RSGSPHSKA | 3067 |
| QT | | PST | | QSLQT | | QNQQI | |
| GSGSPHSKAQN | 2921 | GSGSPHSKAPGL | 2970 | GSGSPHSKSQ | 3019 | GSGSPHTKA | 3068 |
| QLI | | QT | | SQLT | | QNPPT | |
| GSGSPHSKRPEQ | 2922 | GSGSPHSKAQGI | 2971 | GSGSPHSKA | 3020 | GSGSPHTKA | 3069 |
| QT | | RT | | QDRQS | | QNQQT | |
| GSGSPHSKAQRT | 2923 | GSGSPHSKAQA | 2972 | GSGSPHSKA | 3021 | ASGSPHSKA | 3070 |
| MT | | PAT | | QMPST | | QHQQT | |
| GSGSPHSKAQN | 2924 | GSGSPHSKSQSQ | 2973 | GSGSPHSKA | 3022 | ASGSPHSKAI | 3071 |
| QQH | | QI | | QGSLT | | NQQT | |
| HSGSPHSKAQN | 2925 | GSGSPHSKAQIP | 2974 | GSGSPHSKSQ | 3023 | GSGSPHSKA | 3072 |
| QQT | | PT | | NQQT | | PNQQH | |
| GSGSPHSKALH | 2926 | GSGSPHSKAQT | 2975 | GSGSPHSKA | 3024 | ASGSPHSKA | 3073 |
| QHT | | QLT | | QVPAT | | QNHQT | |
| GSGSPHSKAQH | 2927 | GSGSPHSKAQA | 2976 | GSGSPHSKA | 3025 | GSGSPHSKA | 3074 |
| RIT | | PST | | QDKQT | | ENRQT | |
| GSGSPHSKAQYI | 2928 | GSGSPHSKGQN | 2977 | GSGSPHSKA | 3026 | GSGSPHSKV | 3075 |
| HT | | QQT | | HYQQT | | QDQQT | |
| GSGSPHSKAQKF | 2929 | ASGSPHSKAHN | 2978 | GSGSPHSKA | 3027 | GSGSPHSKA | 3076 |
| ET | | QQT | | QVPST | | QTQQA | |
| ESGSPHSKAQN | 2930 | GSGSPHSKAQN | 2979 | GSGSPHSKA | 3028 | GSGSPHSKA | 3077 |
| HQT | | TYA | | RGEQT | | QNQAT | |
| GSGSPHSKAQFP | 2931 | GSGSPHSKSQN | 2980 | GSGSPHSKAP | 3029 | GSGSPHSKG | 2935 |
| ST | | QHI | | GQQT | | QNRQT | |
| PSGSPHSKAQNQ | 2932 | GSGSPHSKAQN | 2981 | GSGSPHSKA | 3030 | GSGSPHSKA | 2984 |
| QT | | HLT | | QSLQI | | QLQQT | |
| GSGSPHSKAHN | 2933 | GSGSPHSKAQIG | 2982 | GSGSPHSKRL | 3031 | GSGSPHSKA | 3033 |
| QQR | | MT | | EQQT | | QKVIT | |
| GSGSPHSKAQAI | 2934 | GSGSPHSKALN | 2983 | GHDSPHKHG | 3160 | GHDSPHKSG | 3202 |
| KT | | KQT | | QNHQT | | QWKRT | |
| GHDSPHKSGQIR | 3078 | GHDSPHKSGQN | 3119 | LHDSPHKSG | 3161 | GHDSPHKSG | 3203 |
| QT | | QHA | | QNQQT | | QSQQI | |
| GHDSPHKIGQN | 3079 | GHDSPHKSGQT | 3120 | GHDSPHKSV | 3162 | GHDSPHKSR | 3204 |
| QHA | | RQT | | QNKQT | | QAQQT | |
| GYDSPHKSGQK | 3080 | GHDSPHKSGQN | 3121 | GQVSPHKSG | 3163 | GHDSPHKSV | 3205 |
| QQT | | LHT | | QNQQT | | QNHQI | |
| GHDSPHKSGQN | 3081 | GHDSPHKSGLN | 3122 | GHDSPHKSG | 3164 | GHDSPHKSK | 3206 |
| QQT | | QQT | | QRQLT | | QNQQA | |
| GHDSPHKSGQS | 3082 | GHDSPHKSAQN | 3123 | GHDSPHKIG | 3165 | GHDSPHKSA | 3207 |
| VQT | | QET | | QNQLT | | QNQLN | |
| GHESPHKSGRSQ | 3083 | GHDSPHKSGQH | 3124 | GHDSPHKSG | 3166 | GHDSPHKSG | 3208 |
| QT | | LQT | | QIIVT | | QTQPT | |
| GHDSPHKSGQN | 3084 | GHDSPHKSRLN | 3125 | IHDSPHKSGQ | 3167 | FHDSPHKSG | 3209 |
| KLE | | QPT | | NQQT | | QNQQT | |
| GHDSPHKTGQN | 3085 | GHDSPHKSGQK | 3126 | GYDSPHKSG | 3168 | GHDSPHKLW | 3210 |
| QQK | | QQT | | QKQST | | INQQT | |
| GRGSPHKRGQN | 3086 | GQDSPHKSGQN | 3127 | MHDSPHKSG | 3169 | GPDSPHKSG | 3211 |
| QQT | | QDT | | QNQQT | | QNQQT | |
| GHDNPHKSGQN | 3087 | GHDSPHKSGRN | 3128 | GDDSPHKSV | 3170 | GHDSPHKSV | 3212 |
| QQT | | QQT | | QNQQT | | QKQLT | |
| GQDSPHKSGQH | 3088 | GHDSPHKSGQN | 3129 | GHDSPHKSV | 3171 | GHDSPHKSG | 3213 |
| QQA | | LLT | | QSHQT | | RNQLA | |
| GHDSPHKSGQIQ | 3089 | GHDSPHKSGQL | 3130 | GHDSPHKSG | 3172 | VHDSPHKSG | 3214 |
| HT | | VIT | | QFVVT | | QNQQS | |
| GHDSPHKSGPR | 3090 | GHDSPHKSRQS | 3131 | GHDSPHKSR | 3173 | GHDSPHKMG | 3215 |
| QQT | | QQT | | QNLQT | | RNQQS | |
| GHDSPHKSGHT | 3091 | GHDSPHKSGRT | 3132 | GHNSPHKSG | 3174 | GHDSPHKSGI | 3216 |
| QQT | | QET | | QNQET | | SIQT | |
| GHDSPHKSGQR | 3092 | GHDSPHKSVQT | 3133 | GHDSPHKSA | 3175 | VHDSPHKSG | 3217 |
| QHT | | HQT | | QNQQI | | QNQQT | |
| GHDSPHKSAQS | 3093 | GHDSPHKSGQN | 3134 | NHDSPHKSG | 3176 | GHDSPHKSV | 3218 |
| QQT | | QPA | | QNQQT | | QNLQT | |
| GHESPHKSGQN | 3094 | KHDSPHKSGQN | 3135 | GHDSPHKSG | 3177 | GHDSPHKMA | 3219 |
| QQS | | QQT | | QSQPT | | HNQQT | |
| GHDSPHKSLQN | 3095 | GHDSPHKSGQT | 3136 | GHESPHKSG | 3178 | GHDSPHKHG | 3220 |
| QQT | | QQT | | QNEQT | | QNQQN | |
| GHDSPHKSGRN | 3096 | GPDSPHKIGQNQ | 3137 | GHDSPHKSA | 3179 | GHDSPHKSV | 3221 |
| QET | | QS | | QNQQT | | QSQQS | |
| GHDSPHKSGQT | 3097 | GHDSPHKSVQN | 3138 | GHDSPHKSG | 3180 | GHDSPHKSG | 3222 |
| QLT | | QQT | | QNQLT | | QTVCT | |
| GHDSPHKSEKN | 3098 | GHDSPHKSRQD | 3139 | GHDSPHKSA | 3181 | GQDSPHKSG | 3223 |
| QQT | | QHT | | QNLLT | | QYQQI | |
| GRDSPHKSGQD | 3099 | GPDSPHKSGQK | 3140 | THDSPHKSG | 3182 | GHDSPHKSG | 3224 |
| QQT | | QQT | | QNQQT | | QQIMT | |
| GHDSPHKTGHN | 3100 | GHDSPHKSRQS | 3141 | GNGSPHKRG | 3183 | GHDSPHKSR | 3225 |
| QQT | | QHT | | QNQQT | | QNEQS | |
| AHDSPHKSGQN | 3101 | GHDSPHKSVQN | 3142 | GHDSPHKSG | 3184 | GHDSPHKSG | 3226 |
| QLT | | QLT | | QSLQT | | LNHQT | |
| GYDSPHKSGQT | 3102 | AHDSPHKSGQN | 3143 | GHDSPHKSA | 3185 | GYDSPHKSG | 3227 |
| QQT | | QQT | | QNHQT | | QNQQT | |
| GHESPHKSGQT | 3103 | GQDSPHKSGQN | 3144 | GHDSPHKSG | 3186 | GHDSPHKSG | 3228 |
| QQI | | QQS | | RNRQT | | QNLQT | |
| GHDSPHKSGQS | 3104 | GHDSPHKSGRN | 3145 | EHDSPHKSG | 3187 | GHDSPHKSR | 3229 |
| KQA | | QQI | | QNQQT | | QDQQT | |
| GHESPHKSGQN | 3105 | GYDSPHKSGQY | 3146 | GHDSPHKYG | 3188 | GDDSPHKSG | 3230 |
| QQT | | QHT | | QNEQT | | QKQLT | |
| GHDSPHKTGQN | 3106 | GHDSPHKSRQN | 3147 | RHDSPHKSG | 3189 | GDDSPHKSG | 3231 |
| QPP | | QQT | | HNQQT | | HNQQT | |
| GHDSPHKSGQSP | 3107 | GHDSPHKSWVR | 3148 | GHDSPHKSQ | 3190 | GHDSPHKSG | 3232 |
| QT | | QQT | | QNQQT | | QMIHT | |
| GNDSPHKSVQN | 3108 | GHESPHKSGQN | 3149 | GHDSPHKSG | 3191 | GHDSPHKSG | 3233 |
| QQT | | QHS | | QNQQI | | RNHQS | |
| GHDSPHKSAQN | 3109 | GHDSPHKIGHN | 3150 | QHDSPHKSG | 3192 | GHDSPHKSV | 3234 |
| YQT | | QQT | | QNQQT | | QNRQT | |
| AHDSPHKIGQN | 3110 | WHDSPHKSGQN | 3151 | RHDSPHKIVQ | 3193 | GHDSPHKSG | 3235 |
| HQT | | QQT | | NQQT | | QKMNT | |
| GHESPHKSAQN | 3111 | RHDSPHKSGQN | 3152 | YHDSPHKSG | 3194 | GHDSPHKSG | 3236 |
| RQT | | QQT | | QNQQT | | QSQQN | |
| GHDSPHKSGQN | 3112 | GHDSPHKSNAW | 3153 | GHDSPHKSV | 3195 | GHDSPHKSG | 3237 |
| QQG | | QQT | | QSKQT | | QYQHA | |
| GQDSPHKIGQN | 3113 | GHDSPHKSGQS | 3154 | GNDSPHKIG | 3196 | GHDSPHKSG | 3117 |
| QQT | | VPT | | HNQQT | | QNQWT | |
| GHDSPHKSGQN | 3114 | GHESPHKSGQNI | 3155 | HHDSPHKSG | 3197 | GHDSPHKRG | 3158 |
| HLT | | QP | | QNQQT | | PDQQS | |
| GHDSPHKSGQY | 3115 | GHDSPHKSVQN | 3156 | GHDSPHKSG | 3198 | GHDSPHKSG | 3200 |
| QHT | | HLN | | QTQQI | | RDQKT | |
| GNDSPHKSVQN | 3116 | GHDSPHKIGLDQ | 3157 | GQDSPHKSG | 3199 | GHDSPHKSV | 3201 |
| HQT | | QT | | QNPLT | | HNQQN | |
| GHDSPHKSVQN | 3118 | GHDSPHKSGES | 3159 | KTISKRGSPH | 4098 | KGLGGSGSP | 4099 |
| QHT | | QQT | | SKAQNQQT | | HSKAQNQQT | |
| KTINGHDSPHSK | 4100 | KTINGSGSPHSK | 4196 | KEIYGSGSPH | 4292 | KTINGSGSPH | 4388 |
| AQNLQT | | TCIQQT | | SKAQNQQT | | KRGQKQQT | |
| KTINGHDSPHSK | 4101 | KTINGSGSPHSK | 4197 | KELSGSGSPH | 4293 | KTINGSGSPH | 4389 |
| AQNQQI | | WLTQQT | | SKAQNQQT | | KRGQNQET | |
| KTINGSGSPHFT | 4102 | KTINGSGSPHSK | 4198 | KETIGSGSPH | 4294 | KTINGSGSPH | 4390 |
| RQNQQT | | WVVQQT | | SKAQNQQT | | KRGQNQLT | |
| KTINGSGSPHSL | 4103 | KTINGSGSPHSK | 4199 | KEVLGSGSP | 4295 | KTINGSGSPH | 4391 |
| PWNQQT | | YRLQQT | | HSKAQNQQT | | KRGRNQQT | |
| KTINGHDSPHSK | 4104 | KTINGSGSPHSK | 4200 | KFALGHDSP | 4296 | KTINGSGSPH | 4392 |
| AQNHQT | | YSKQQT | | HKSGQKQQT | | KSGGNQQT | |
| KTMNGHDSPHS | 4105 | KTINGSGSPHSK | 4201 | KIINGHDSPH | 4297 | KTINGSGSPH | 4393 |
| KAQNQQT | | YSRQQT | | KSGQNLVL | | KSGHNQET | |
| KPYKGSGSPHSK | 4106 | KTINGSGSPHSL | 4202 | KIINGHDSPH | 4298 | KTINGSGSPH | 4394 |
| AQNQQT | | KRNQQT | | KSGQRNYT | | KSGHNQLT | |
| KRLWGSGSPHS | 4107 | KTINGSGSPHSL | 4203 | KIINGHDSPH | 4299 | KTINGSGSPH | 4395 |
| KAQNQQT | | WFNQQT | | SKAQNQQT | | KSGHNQQN | |
| KRMRGSGSPHS | 4108 | KTINGSGSPHSL | 4204 | KLNPGHDSP | 4300 | KTINGSGSPH | 4396 |
| KAQNQQT | | WPNQQT | | HKSGQTQQT | | KSGLNQLT | |
| KRTYGSGSPHSK | 4109 | KTINGSGSPHSL | 4205 | KLNRGHDSP | 4301 | KTINGSGSPH | 4397 |
| AQNQQT | | WTNQQT | | HKSGQNQQS | | KSGPNQQT | |
| KTINCLRSPHSK | 4110 | KTINGSGSPHSM | 4206 | KLSSGHDSPH | 4302 | KTINGSGSPH | 4398 |
| AQNQQT | | RRNQQT | | KSGQNQQN | | KSGQGQQT | |
| KTINFSRSPHSK | 4111 | KTINGSGSPHSP | 4207 | KNINGHDSP | 4303 | KTINGSGSPH | 4399 |
| AQNQQT | | CLNQQT | | HSKAQNQQT | | KSGQHLQT | |
| KTINGLRSPHFK | 4112 | KTINGSGSPHSQ | 4208 | KNNDGSGSP | 4304 | KTINGSGSPH | 4400 |
| AQNQQT | | WQNQQT | | HSKAQNQQT | | KSGQHQQT | |
| KTINGNRSPHNK | 4113 | KTINGSGSPHSR | 4209 | KNVMGSGSP | 4305 | KTINGSGSPH | 4401 |
| AQNQQT | | CANQQT | | HSKAQNQQT | | KSGQKHQT | |
| KTINGPRSPHYK | 4114 | KTINGSGSPHSRI | 4210 | KPINGHDSPH | 4306 | KTINGSGSPH | 4402 |
| AQNQQT | | RNQQT | | KSGQNKLS | | KSGQKQQS | |
| KTINGQASPHW | 4115 | KTINGSGSPHSR | 4211 | KPINGHDSPH | 4307 | KTINGSGSPH | 4403 |
| KAQNQQT | | KSNQQT | | KSGQNLSS | | KSGQNEQT | |
| KTINGRCSPHSK | 4116 | KTINGSGSPHSR | 4212 | KPINGHDSPH | 4308 | KTINGSGSPH | 4404 |
| AQNQQT | | LWNQQT | | SKAQNQQT | | KSGQNHQT | |
| KTINGRHSPHSK | 4117 | KTINGSGSPHSR | 4213 | KRINGHDSPH | 4309 | KTINGSGSPH | 4405 |
| AQNQQT | | RFNQQT | | SKAQNQQT | | KSGQNKQT | |
| KTINGRKSPHRK | 4118 | KTINGSGSPHSR | 4214 | KSCSGHDSP | 4310 | KTINGSGSPH | 4406 |
| AQNQQT | | RPNQQT | | HKSGQNQQS | | KSGQNKTS | |
| KTINGRLSPHW | 4119 | KTINGSGSPHSR | 4215 | KSINGHDSPH | 4311 | KTINGSGSPH | 4407 |
| KAQNQQT | | SCNQQT | | KSGQNLAS | | KSGQNQEA | |
| KTINGRLSPHYK | 4120 | KTINGSGSPHSR | 4216 | KSINGHDSPH | 4312 | KTINGSGSPH | 4408 |
| AQNQQT | | SKNQQT | | KSGQNLFL | | KSGQNQET | |
| KTINGRPSPHMK | 4121 | KTINGSGSPHSR | 4217 | KSINGHDSPH | 4313 | KTINGSGSPH | 4409 |
| AQNQQT | | TKNQQT | | KSGQNLLM | | KSGQNQKT | |
| KTINGRSSPHWK | 4122 | KTINGSGSPHSR | 4218 | KSINGHDSPH | 4314 | KTINGSGSPH | 4410 |
| AQNQQT | | WLNQQT | | KSGQNLLQ | | KSGQNQQI | |
| KTINGRWSPHSK | 4123 | KTINGSGSPHSS | 4219 | KSINGHDSPH | 4315 | KTINGSGSPH | 4411 |
| AQNQQT | | VCNQQT | | KSGQNSLG | | KSGQNQQR | |
| KTINGSGSPHAP | 4124 | KTINGSGSPHSS | 4220 | KSINGHDSPH | 4316 | KTINGSGSPH | 4412 |
| CQNQQT | | WRNQQT | | KSGQNTLQ | | KSGQNQRT | |
| KTINGSGSPHA | 4125 | KTINGSGSPHSV | 4221 | KSINGHDSPH | 4317 | KTINGSGSPH | 4413 |
| WAQNQQT | | CQNQQT | | KSSSNQQT | | KSGQNQYT | |
| KTINGSGSPHCM | 4126 | KTINGSGSPHSV | 4222 | KSINGHDSPH | 4318 | KTINGSGSPH | 4414 |
| RQNQQT | | LCNQQT | | KYKLNQQT | | KSGQRQQT | |
| KTINGSGSPHFC | 4127 | KTINGSGSPHSV | 4223 | KSINGSGSPH | 4319 | KTINGSGSPH | 4415 |
| SQNQQT | | RRNQQT | | KSGQKQQT | | KSGQSQQT | |
| KTINGSGSPHFL | 4128 | KTINGSGSPHSV | 4224 | KSINGSGSPH | 4320 | KTINGSGSPH | 4416 |
| FQNQQT | | SCNQQT | | KSGQNQQT | | KSGQYQRT | |
| KTINGSGSPHFW | 4129 | KTINGSGSPHSW | 4225 | KSINGSGSPH | 4321 | KTINGSGSPH | 4417 |
| AQNQQT | | ALNQQT | | SKAQGLST | | KSGRNQQA | |
| KTINGSGSPHLC | 4130 | KTINGSGSPHSW | 4226 | KSINGSGSPH | 4322 | KTINGSGSPH | 4418 |
| AQNQQT | | ITNQQT | | SKAQLLGT | | KSRHNQQT | |
| KTINGSGSPHLR | 4131 | KTINGSGSPHSW | 4227 | KSINGSGSPH | 4323 | KTINGSGSPH | 4419 |
| YQNQQT | | PMNQQT | | SKTSWQQT | | KSRQYQQT | |
| KTINGSGSPHLY | 4132 | KTINGSGSPHSW | 4228 | KSMNGHDSP | 4324 | KTINGSGSPH | 4420 |
| YQNQQT | | RSNQQT | | HSKAQNQQT | | RKAQAPGT | |
| KTINGSGSPHPL | 4133 | KTINGSGSPHSY | 4229 | KSTLGSGSPH | 4325 | KTINGSGSPH | 4421 |
| CQNQQT | | FLNQQT | | SKAQNQHT | | SKAAMKQT | |
| KTINGSGSPHRI | 4134 | KTINGSGSPHSY | 4230 | KSTLGSGSPH | 4326 | KTINGSGSPH | 4422 |
| RQNQQT | | TYNQQT | | SKAQNQQN | | SKAGRQQT | |
| KTINGSGSPHRL | 4135 | KTINGSGSPHSY | 4231 | KSTVGSGSPH | 4327 | KTINGSGSPH | 442 |
| FQNQQT | | WQNQQT | | SKAQTQQT | | SKAGRTQT | |
| KTINGSGSPHSC | 4136 | KTINGSGSPHTL | 4232 | KTCKESGSPH | 4328 | KTINGSGSPH | 4424 |
| GQNQQT | | CQNQQT | | SKAQNQQT | | SKAKSNQT | |
| KTINGSGSPHSC | 4137 | KTINGSGSPHWL | 4233 | KTCKGSGSP | 4329 | KTINGSGSPH | 4425 |
| LRNQQT | | RQNQQT | | HSKAQNQQT | | SKALKTQT | |
| KTINGSGSPHSC | 4138 | KTINGSGSPHWP | 4234 | KTCKSSGSPH | 4330 | KTINGSGSPH | 4426 |
| LSNQQT | | SQNQQT | | SKAQNQQT | | SKAPRTQT | |
| KTINGSGSPHSC | 4139 | KTINGSGSPHYL | 4235 | KTDMGSGSP | 4331 | KTINGSGSPH | 4427 |
| RLNQQT | | RQNQQT | | HSKAQNQQT | | SKAQAART | |
| KTINGSGSPHSC | 4140 | KTINGSGSPHYT | 4236 | KTDNGIGSPH | 4332 | KTINGSGSPH | 4428 |
| SLNQQT | | RQNQQT | | SKAQNQQT | | SKAQAILT | |
| KTINGSGSPHSK | 4141 | KTINGSLSPHLW | 4237 | KTEGGSGSP | 4333 | KTINGSGSPH | 4429 |
| ACTLQT | | AQNQQT | | HSKAQNQQT | | SKAQCRGT | |
| KTINGSGSPHSK | 4142 | KTINGSPSPHCQ | 4238 | KTEHHSGSP | 4334 | KTINGSGSPH | 4430 |
| AFRAQT | | AQNQQT | | HSKAQNQQT | | SKAQGLRT | |
| KTINGSGSPHSK | 4143 | KTINGSRSPHLC | 4239 | KTEKDSGSP | 4335 | KTINGSGSPH | 4431 |
| AIRKQT | | AQNQQT | | HSKAQNQQT | | SKAQKGVL | |
| KTINGSGSPHSK | 4144 | KTINGSRSPHWR | 4240 | KTELGHDSP | 4336 | KTINGSGSPH | 4432 |
| AQASRT | | AQNQQT | | HKRGQNQQT | | SKAQKSNT | |
| KTINGSGSPHSK | 4145 | KTINGSVSPHWL | 4241 | KTESVSGSPH | 4337 | KTINGSGSPH | 4433 |
| AQFELT | | AQNQQT | | SKAQNQQT | | SKAQNNKF | |
| KTINGSGSPHSK | 4146 | KTINGTFSPHRK | 4242 | KTETNSGSPH | 4338 | KTINGSGSPH | 4434 |
| AQIVIT | | AQNQQT | | SKAQNQQT | | SKAQNRRT | |
| KTINGSGSPHSK | 4147 | KTINGWTSPHR | 4243 | KTETYSGSPH | 4339 | KTINGSGSPH | 4435 |
| AQLART | | KAQNQQT | | SKAQNQQT | | SKAQPKQT | |
| KTINGSGSPHSK | 4148 | KTINRGISPHSK | 4244 | KTEWLSGSP | 4340 | KTINGSGSPH | 4436 |
| AQLQRT | | AQNQQT | | HSKAQNQQT | | SKAQRAPT | |
| KTINGSGSPHSK | 4149 | KTINTVRSPHSK | 4245 | KTENGSGSPH | 4341 | KTINGSGSPH | 4437 |
| AQNARR | | AQNQQT | | KSGQNQQT | | SKAQREHT | |
| KTINGSGSPHSK | 4150 | KTKLRSGSPHSK | 4246 | KTGLRHDSP | 4342 | KTINGSGSPH | 4438 |
| AQNCPR | | AQNQQT | | HKSGQKQQT | | SKAQRFGT | |
| KTINGSGSPHSK | 4151 | KTRLRSGSPHSK | 4247 | KTGLRHDSP | 4343 | KTINGSGSPH | 4439 |
| AQNMRR | | AQNQQT | | HKSGQNQQS | | SKAQRPCT | |
| KTINGSGSPHSK | 4152 | KWLLGSGSPHS | 4248 | KTGVTHDSP | 4344 | KTINGSGSPH | 4440 |
| AQNRRV | | KAQNQQT | | HKSGQKQQT | | SKAQRQAT | |
| KTINGSGSPHSK | 4153 | KWSQGSGSPHS | 4249 | KTIDGHESPH | 4345 | KTINGSGSPH | 4441 |
| AQPSRT | | KAQNQQT | | SKAQNQQT | | SKAQRQPT | |
| KTINGSGSPHSK | 4154 | KWYLGSGSPHS | 4250 | KTIEGHDSPH | 4346 | KTINGSGSPH | 4442 |
| AQQVKT | | KAQNQQT | | KSGQTQQT | | SKAQTKLT | |
| KTINGSGSPHSK | 4155 | KYHSGSGSPHS | 4251 | KTIHGHDSPH | 4347 | KTINGSGSPH | 4443 |
| AQQVRT | | KAQNQQT | | SKAQNQQT | | SKAQTTHT | |
| KTINGSGSPHSK | 4156 | KYLPGSGSPHSK | 4252 | KTIHGHESPH | 4348 | KTINGSGSPH | 4444 |
| AQRLKT | | AQNQQT | | SKAQNQQT | | SKAQVQRT | |
| KTINGSGSPHSK | 4157 | KAINGGGSPHSK | 4253 | KTIIGHDSPH | 4349 | KTINGSGSPH | 4445 |
| AQRRAT | | TQNQQT | | KSGQNRSS | | SKAQVVRT | |
| KTINGSGSPHSK | 4158 | KAINGHDSPHK | 4254 | KTIIGHDSPH | 4350 | KTINGSGSPH | 4446 |
| AQRRGT | | RSPNQQT | | KSGQRLGT | | SKAQWPNT | |
| KTINGSGSPHSK | 4159 | KAINGHDSPHKS | 4255 | KTIIGSGSPH | 4351 | KTINGSGSPH | 4447 |
| AQRRRT | | FSPQQT | | KSGQNQQT | | SKAQYPST | |
| KTINGSGSPHSK | 4160 | KAINGHDSPHKS | 4256 | KTIKGHDSPH | 4352 | KTINGSGSPH | 4448 |
| AQRTRT | | GENQQP | | KSGQNMLF | | SKARALQT | |
| KTINGSGSPHSK | 4161 | KAINGHDSPHKS | 4257 | KTILGSGSPH | 4353 | KTINGSGSPH | 4449 |
| AQRVHT | | GQLART | | SKAQNLQT | | SKARDQHT | |
| KTINGSGSPHSK | 4162 | KAINGHDSPHKS | 4258 | KTINGCSSPH | 4354 | KTINGSGSPH | 4450 |
| AQTYRT | | GQNAFL | | WKAQNQQT | | SKARFQQT | |
| KTINGSGSPHSK | 4163 | KAINGHDSPHKS | 4259 | KTINGGGSTH | 4355 | KTINGSGSPH | 4451 |
| AQVRKT | | GQNAYT | | SKAQNQQT | | SKARRTQT | |
| KTINGSGSPHSK | 4164 | KAINGHDSPHKS | 4260 | KTINGHDSPH | 4356 | KTINGSGSPH | 4452 |
| ARGRQT | | GQNFAS | | KAGQSQQT | | SKARSLQT | |
| KTINGSGSPHSK | 4165 | KAINGHDSPHKS | 4261 | KTINGHDSPH | 4357 | KTINGSGSPH | 4453 |
| ARLCQT | | GQNLAS | | KRGQNVPS | | SKARVIQT | |
| KTINGSGSPHSK | 4166 | KAINGHDSPHKS | 4262 | KTINGHDSPH | 4358 | KTINGSGSPH | 4454 |
| ARLKQT | | GQNLGS | | KRGRSYQT | | SKAWYLQT | |
| KTINGSGSPHSK | 4167 | KAINGHDSPHKS | 4263 | KTINGHDSPH | 4359 | KTINGSGSPH | 4455 |
| ARNSQT | | GQNLKF | | KTGQNPPT | | SKGGGQQT | |
| KTINGSGSPHSK | 4168 | KAINGHDSPHKS | 4264 | KTINGHDSPH | 4360 | KTINGSGSPH | 4456 |
| ARWVQT | | GQNLLK | | SKAENQQT | | SKGSRQQT | |
| KTINGSGSPHSK | 4169 | KAINGHDSPHKS | 4265 | KTINGHDSPH | 4361 | KTINGSGSPH | 4457 |
| AVRWQT | | GQNLSR | | SKALSLQT | | SKLQRQQT | |
| KTINGSGSPHSK | 4170 | KAINGHDSPHKS | 4266 | KTINGHDSPH | 4362 | KTINGSGSPH | 4458 |
| AYTRQT | | GQNLSS | | SKAQGQQT | | SKMLRQQT | |
| KTINGSGSPHSK | 4171 | KAINGHDSPHKS | 4267 | KTINGHDSPH | 4363 | KTINGSGSPH | 4459 |
| CQSQQT | | GQNSLG | | SKAQHQQT | | SKSSIKQT | |
| KTINGSGSPHSK | 4172 | KAINGHDSPHKS | 4268 | KTINGHDSPH | 4364 | KTINGSGSPH | 4460 |
| FLRQQT | | GQNTLQ | | SKAQIQQT | | SKVRFQQT | |
| KTINGSGSPHSK | 4173 | KAINGHDSPHKS | 4269 | KTINGHDSPH | 4365 | KTINGSGSPH | 4461 |
| FRFQQT | | GQNTSL | | SKAQKQQT | | SVVWNQQT | |
| KTINGSGSPHSK | 4174 | KAINGHDSPHKS | 4270 | KTINGHDSPH | 4366 | KTINGSTSPH | 4462 |
| FRLQQT | | GQRLGT | | SKAQNLSS | | KLAQNQQP | |
| KTINGSGSPHSK | 4175 | KAINGHDSPHKS | 4271 | KTINGHDSPH | 4367 | KTINRHDSPH | 4463 |
| FRRQQT | | GQRNYT | | SKAQNPQT | | KSGQRPST | |
| KTINGSGSPHSK | 4176 | KAINGHDSPHKS | 4272 | KTINGHDSPH | 4368 | KTINRIMSPH | 4464 |
| GMKQQT | | GQRPST | | SKAQNQET | | SKAQNQQT | |
| KTINGSGSPHSK | 4177 | KAINGHDSPHKS | 4273 | KTINGHDSPH | 4369 | KTINTARSPH | 4465 |
| KLRQQT | | GQRPVT | | SKAQNQHT | | SKAQNQQT | |
| KTINGSGSPHSK | 4178 | KAINGHDSPHKS | 4274 | KTINGHDSPH | 4370 | KTISGHDSPH | 4466 |
| KRPQQT | | GQVPST | | SKAQNQLT | | SKAQNQQT | |
| KTINGSGSPHSK | 4179 | KAINGHDSPHKS | 4275 | KTINGHDSPH | 4371 | KTISGSGSPH | 4467 |
| KSRQQT | | LSNQQT | | SKAQNQPT | | KSGQNQQT | |
| KTINGSGSPHSK | 4180 | KAINGHDSPHKS | 4276 | KTINGHDSPH | 4372 | KTITGHDSPH | 4468 |
| LYRQQT | | VLSQQT | | SKAQNQQA | | KSGQRLGT | |
| KTINGSGSPHSK | 4181 | KAINGHDSPHKT | 4277 | KTINGHDSPH | 4373 | KTITGSGSPH | 4469 |
| LYWQQT | | LQNQQT | | SKAQNTGS | | KSGQNQQT | |
| KTINGSGSPHSK | 4182 | KAINGHNSPHSK | 4278 | KTINGHDSPH | 4374 | KTIYGHDSP | 4470 |
| PRMQQT | | AQNQQT | | SKAQSQQT | | HKSGQRLGT | |
| KTINGSGSPHSK | 4183 | KAINGLDSPHSK | 4279 | KTINGHDSPH | 4375 | KTLNGHDSP | 4471 |
| RFPQQT | | AQNQQT | | SKAQTQQT | | HKSGQNLFL | |
| KTINGSGSPHSK | 4184 | KAINGSGSPHKS | 4280 | KTINGHDSPH | 4376 | KTLNGHDSP | 4472 |
| RFRQQT | | GQNQQT | | SKAQYQQT | | HKSGQNLSS | |
| KTINGSGSPHSK | 4185 | KAINGSGSPHSK | 4281 | KTINGHDSPH | 4377 | KTLSFHDSPH | 4473 |
| RPYQQT | | AQGQQT | | SKARNQQT | | KSGQNQQS | |
| KTINGSGSPHSK | 4186 | KAINGSGSPHSK | 4282 | KTINGHDSPH | 4378 | KTSNGSGSP | 4474 |
| RRMQQT | | AQLSGT | | SKLPGQQT | | HSKAQNTMT | |
| KTINGSGSPHSK | 4187 | KAINGSGSPHSK | 4283 | KTINGHDSPH | 4379 | KTTNGHDSP | 4475 |
| RSKQQT | | AQNGSL | | SKSPNQQT | | HSKAQNQQT | |
| KTINGSGSPHSK | 4188 | KAINGSGSPHSK | 4284 | KTINGHESPH | 4380 | KTVNGGGSP | 4476 |
| RSRQQT | | AQNSLL | | KSGQNAFL | | HSKAQNQQT | |
| KTINGSGSPHSK | 4189 | KAINGSGSPHSK | 4285 | KTINGIGSPH | 4381 | KTVNGHDSP | 4477 |
| RTMQQT | | AVGLQT | | SKAPNEQT | | HKSGQNVSL | |
| KTINGSGSPHSK | 4190 | KAINGSGSPHSK | 4286 | KTINGQDSPH | 4382 | KTVNGHDSP | 4478 |
| RTRQQT | | SLLQQT | | KSGQNLHM | | HKSGQRPST | |
| KTINGSGSPHSK | 4191 | KAINGSGSPHSK | 4287 | KTINGRGSPH | 4383 | KTVNGHDSP | 4479 |
| RVRQQT | | SLPQQT | | SKAQIGMT | | HKSGQTQQA | |
| KTINGSGSPHSK | 4192 | KAINGSGSPHSK | 4288 | KTINGRGSPH | 4384 | KTVNGHESP | 4480 |
| RYIQQT | | STFQQT | | SKAQNQVL | | HSKAQNQQT | |
| KTINGSGSPHSK | 4193 | KAITGHDSPHSK | 4289 | KTINGRGSPH | 4385 | KTVNGSGSP | 4481 |
| RYNQQT | | AQNQQT | | SKAQSPTT | | HSKAQGLST | |
| KTINGSGSPHSK | 4194 | KDVMGSGSPHS | 4290 | KTINGRGSPH | 4386 | KTVNGSGSP | 4482 |
| RYPQQT | | KAQNQQT | | SKATSFQT | | HSKAQNVTS | |
| KTINGSGSPHSK | 4195 | KEIVGSGSPHSK | 4291 | KTINGSGSPH | 4387 | KTVPASGSP | 4483 |
| RYSQQT | | AQNQQT | | FVVQNQQT | | HSKAQNQQT | |
| NTINGSGSPHSK | 4484 | TTINGGGSPHSK | 4485 | | | | |
| AHNQQT | | AQNQQT | | | | | |

TABLE 2A
Exemplary Peptide Sequences

| SEQ | Amino | SEQ | |
|---|---|---|---|
| ID | Acid | ID | |
| NO: | Sequence | NO: | Nucleotide Sequence |
| 941 | SPHSKA | 942 | AGCCCACACAGCAAAGCA |
| 943 | HDSPHKSG | 944 | CACGACAGCCCACACAAAAGCGGA |
| 2 | HDSPHK | 3 | CACGACAGCCCACACAAA |

TABLE 2B
Exemplary Peptide Sequences

| Amino | SEQ | Amino | SEQ | Amino | SEQ | Amino | SEQ |
|---|---|---|---|---|---|---|---|
| Acid | ID | Acid | ID | Acid | ID | Acid | ID |
| Sequence | NO: | Sequence | NO: | Sequence | NO: | Sequence | NO: |
| SPHSKA | 945 | SPHKKN | 954 | SPHKTS | 963 | SPHTRG | 972 |
| SPHKSG | 946 | SPHVRM | 955 | SPHKTT | 964 | SPHVRG | 973 |
| SPHARM | 947 | SPHRKA | 956 | SPHKTY | 965 | SPHKRG | 974 |
| SPHVKS | 948 | SPHKFG | 957 | SPHKYG | 966 | SPHGAR | 975 |
| SPHASR | 949 | SPHKIG | 958 | SPHSKD | 967 | SPHRSG | 976 |
| SPHVKI | 950 | SPHKLG | 959 | SPHSKP | 968 | SPHKSA | 977 |
| SPHKSR | 951 | SPHSKL | 960 | SPHSRA | 969 | SPHSKR | 978 |
| SPHSLR | 952 | SPHSRG | 961 | SPHSSR | 970 | SPHFLR | 979 |
| SPHSKW | 953 | SPHSKS | 962 | SPHWKA | 971 | SPHVRR | 980 |
| STHASR | 985 | SQHKSG | 986 | HDSPHK | 2 | HDSPHSKA | 4486 |

[0902] In some embodiments, an AAV capsid variant described herein comprises an amino acid sequence having the formula [N1]-[N2]-[N3], wherein [N2] comprises the amino acid sequence of SPH and [N3] comprises X4, X5, and X6, wherein at least one of X4, X5, or X6 is a basic amino acid, e.g., a K or R. In some embodiments, position X4 of [N2] is K. In some embodiments, position X5 of [N2] is K.

[0903] In some embodiments, [N1] comprises X1, X2, and X3, wherein at least one of X1, X2, or X3 is G. In some embodiments, position X1 of [N1] is: G, V, R, D, E, M, T, I, S, A, N, L, K, H, P, W, or C. In some embodiments, position X2 of [N1] is: S, V, L, N, D, H, R, P, G, T, I, A, E, Y, M, or Q. In some embodiments, position X3 of [N1] is: G, C, L, D, E, Y, H, V, A, N, P, or S. In some embodiments, [N1] comprises GS, SG, GH, HD, GQ, QD, VS, CS, GR, RG, QS, SH, MS, RN, TS, IS, GP, ES, SS, GN, AS, NS, LS, GG, KS, GT, PS, RS, GI, WS, DS, ID, GL, DA, DG, ME, EN, KN, KE, AI, NG, PG, TG, SV, IG, LG, AG, EG, SA, YD, HE, HG, RD, ND, PD, MG, QV, DD, HN, HP, GY, GM, GD, or HS. In some embodiments, [N1] comprises GS, SG, GH, or HD. In some embodiments [N1] is or comprises GSG, GHD, GQD, VSG, CSG, CSH, GQS, GRG, GSH, RVG, GSC, GLL, GDD, GHE, GNY, MSG, RNG, TSG, ISG, GPG, ESG, SSG, GNG, ASG, NSG, LSG, GGG, KSG, HSG, GTG, PSG, GSV, RSG, GIG, WSG, DSG, IDG, GLG, DAG, DGG, MEG, ENG, GSA, KNG, KEG, AIG, GYD, GHG, GRD, GND, GPD, GMG, GQV, GHN, GHP, or GHS. In some embodiments, [N1] is or comprises GSG. In some embodiments, [N1] is or comprises GHD. In some embodiments, [N1]-[N2] comprises SGSPH (SEQ ID NO: 6668), HDSPH (SEQ ID NO: 6619), QDSPH (SEQ ID NO: 6669), RGSPH (SEQ ID NO: 6670), SHSPH (SEQ ID NO: 6671), QSSPH (SEQ ID NO: 6672), DDSPH (SEQ ID NO: 6673), HESPH (SEQ ID NO: 6674), NYSPH (SEQ ID NO: 6675), VGSPH (SEQ ID NO: 6676), SCSPH (SEQ ID NO: 6677), LLSPH (SEQ ID NO: 6678), NGSPH (SEQ ID NO: 6679), PGSPH (SEQ ID NO: 6680), GGSPH (SEQ ID NO: 6681), TGSPH (SEQ ID NO: 6682), SVSPH (SEQ ID NO: 6683), IGSPH (SEQ ID NO: 6684), DGSPH (SEQ ID NO: 6685), LGSPH (SEQ ID NO: 6686), AGSPH (SEQ ID NO: 6687), EGSPH (SEQ ID NO: 6688), SASPH (SEQ ID NO: 6689), YDSPH (SEQ ID NO: 6690), HGSPH (SEQ ID NO: 6691), RDSPH (SEQ ID NO: 6692), NDSPH (SEQ ID NO: 6693), PDSPH (SEQ ID NO: 6694), MGSPH (SEQ ID NO: 6695), QVSPH (SEQ ID NO: 6696), HNSPH (SEQ ID NO: 6697), HPSPH (SEQ ID NO: 6698), or HSSPH (SEQ ID NO: 6699); an amino acid sequence comprising any portion of any of the aforesaid amino acid sequences (e.g., any 2, 3, or 4 amino acids, e.g., consecutive amino acids) thereof; an amino acid sequence comprising one, two, or three but no more than four modifications, e.g., substitutions (e.g., conservative substitutions), insertions, or deletions, relative to any of the aforesaid amino acid sequences; or an amino acid sequence comprising one, two, or three but no more than four different amino acids, relative to any one of the aforesaid amino acid sequences. In some embodiments, [N1]-[N2] is or comprises GSGSPH (SEQ ID NO: 6700), GHDSPH (SEQ ID NO: 6701), GQDSPH (SEQ ID NO: 6702), VSGSPH (SEQ ID NO: 6703), CSGSPH (SEQ ID NO: 6704), GRGSPH (SEQ ID NO: 6705), CSHSPH (SEQ ID NO: 6706), GQSSPH (SEQ ID NO: 6707), GSHSPH (SEQ ID NO: 6708), GDDSPH (SEQ ID NO: 6709), GHESPH (SEQ ID NO: 6710), GNYSPH (SEQ ID NO: 6711), RVGSPH (SEQ ID NO: 6712), GSCSPH (SEQ ID NO: 6713), GLLSPH (SEQ ID NO: 6714), MSGSPH (SEQ ID NO: 6715), RNGSPH (SEQ ID NO: 6716), TSGSPH (SEQ ID NO: 6717), ISGSPH (SEQ ID NO: 6718), GPGSPH (SEQ ID NO: 6719), ESGSPH (SEQ ID NO: 6720), SSGSPH (SEQ ID NO: 6721), GNGSPH (SEQ ID NO: 6722), ASGSPH (SEQ ID NO: 6723), NSGSPH (SEQ ID NO: 6724), LSGSPH (SEQ ID NO: 6725), GGGSPH (SEQ ID NO: 6726), KSGSPH (SEQ ID NO: 6727), HSGSPH (SEQ ID NO: 6728), GTGSPH (SEQ ID NO: 6729), PSGSPH (SEQ ID NO: 6730), GSVSPH (SEQ ID NO: 6731), RSGSPH (SEQ ID NO: 6732), GIGSPH (SEQ ID NO: 6733), WSGSPH (SEQ ID NO: 6734), DSGSPH (SEQ ID NO: 6735), IDGSPH (SEQ ID NO: 6736), GLGSPH (SEQ ID NO: 6737), DAGSPH (SEQ ID NO: 6738), DGGSPH (SEQ ID NO: 6739), MEGSPH (SEQ ID NO: 6740), ENGSPH (SEQ ID NO: 6741), GSASPH (SEQ ID NO: 6742), KNGSPH (SEQ ID NO: 6743), KEGSPH (SEQ ID NO: 6744), AIGSPH (SEQ ID NO: 6745), GYDSPH (SEQ ID NO: 6746), GHGSPH (SEQ ID NO: 6747), GRDSPH (SEQ ID NO: 6748), GNDSPH (SEQ ID NO: 6749), GPDSPH (SEQ ID NO: 6750), GMGSPH (SEQ ID NO: 6751), GQVSPH (SEQ ID NO: 6752), GHNSPH (SEQ ID NO: 6753), GHPSPH (SEQ ID NO: 6754), or GHSSPH (SEQ ID NO: 6755); an amino acid sequence comprising any portion of any of the aforesaid amino acid sequences (e.g., any 2, 3, 4, or 5 amino acids, e.g., consecutive amino acids) thereof; an amino acid sequence comprising one, two, or three but no more than four modifications, e.g., substitutions (e.g., conservative substitutions), insertions, or deletions, relative to any of the aforesaid amino acid sequences; or an amino acid sequence comprising one, two, or three but no more than four different amino acids, relative to any one of the aforesaid amino acid sequences. In some embodiments, [N1]-[N2] is or comprises GSGSPH (SEQ ID NO: 6700). In some embodiments, [N1]-[N2] is or comprises GHDSPH (SEQ ID NO: 6701).

[0904] In some embodiments, X4, X5, or both of [N3] are K. In some embodiments, X4, X5, or X6 of [N3] is R. In some embodiments, position X4 of [N3] is: A, K, V, S, T, G, F, W, V, N, or R. In some embodiments, position X5 of [N3] is: S, K, T, F, I, L, Y, H, M, or R. In some embodiments, position X6 of [N3] is: G, R, A, M, I, N, T, Y, D, P, V, L, E, W, N, Q, K, or S. In some embodiments, [N3] comprises SK, KA, KS, AR, RM, VK, AS, SR, VK, KR, KK, KN, VR, RS, RK, KT, TS, KF, FG, KI, IG, KL, LG, TT, TY, KY, YG, KD, KP, TR, RG, VR, GA, SL, SS, FL, WK, SA, RA, LR, KW, RR, GK, TK, NK, AK, KV, KG, KH, KM, TG, SE, SV, SW, SN, HG, SQ, LW, MG, MA, or SG. In some embodiments, [N3] comprises SK, KA, KS, or SG. In some embodiments, [N3] is or comprises SKA, KSG, ARM, VKS, ASR, VKI, KKN, VRM, RKA, KTS, KFG, KIG, KLG, KTT, KTY, KYG, SKD, SKP, TRG, VRG, KRG, GAR, KSA, KSR, SKL, SRA, SKR, SLR, SRG, SSR, FLR, SKW, SKS, WKA, VRR, SKV, SKT, SKG, GKA, TKA, NKA, SKL, SKN, AKA, KTG, KSL, KSE, KSV, KSW, KSN, KHG, KSQ, KSK, KLW, WKG, KMG, KMA, or RSG. In some embodiments, [N3] is or comprises SKA. In some embodiments, [N3] is or comprises KSG. In some embodiments, [N2]-[N3] comprises SPHSK (SEQ ID NO: 6617), SPHKS (SEQ ID NO: 6620), SPHAR (SEQ ID NO: 6621), SPHVK (SEQ ID NO: 6622), SPHAS (SEQ ID NO: 6623), SPHKK (SEQ ID NO: 6624), SPHVR (SEQ ID NO: 6625), SPHRK (SEQ ID NO: 6626), SPHKT (SEQ ID NO: 6627), SPHKF (SEQ ID NO: 6628), SPHKI (SEQ ID NO: 6629), SPHKL (SEQ ID NO: 6630), SPHKY (SEQ ID NO: 6631), SPHTR (SEQ ID NO: 6632), SPHKR (SEQ ID NO: 6633), SPHGA (SEQ ID NO: 6634), SPHSR (SEQ ID NO: 6635), SPHSL (SEQ ID NO: 6636), SPHSS (SEQ ID NO: 6637), SPHFL (SEQ ID NO: 6638), SPHWK (SEQ ID NO: 6639), SPHGK (SEQ ID NO: 6640), SPHTK (SEQ ID NO: 6641), SPHNK (SEQ ID NO: 6642), SPHAK (SEQ ID NO: 6643), SPHKH (SEQ ID NO: 6644), SPHKM (SEQ ID NO: 6645), or SPHRS (SEQ ID NO: 6646). In some embodiments [N2]-[N3] comprises SPHSK (SEQ ID NO: 6617) or SPHKS (SEQ ID NO: 6620). In some embodiments, [N2]-[N3] is or comprises SPHSKA (SEQ ID NO: 941), SPHKSG (SEQ ID NO: 946), SPHARM (SEQ ID NO: 947), SPHVKS (SEQ ID NO: 948), SPHASR (SEQ ID NO: 949), SPHVKI (SEQ ID NO: 950), SPHKKN (SEQ ID NO: 954), SPHVRM (SEQ ID NO: 955), SPHRKA (SEQ ID NO: 956), SPHKFG (SEQ ID NO: 957), SPHKIG (SEQ ID NO: 958), SPHKLG (SEQ ID NO: 959), SPHKTS (SEQ ID NO: 963), SPHKTT (SEQ ID NO: 964), SPHKTY (SEQ ID NO: 965), SPHKYG (SEQ ID NO: 966), SPHSKD (SEQ ID NO: 967), SPHSKP (SEQ ID NO: 968), SPHTRG (SEQ ID NO: 972), SPHVRG (SEQ ID NO: 973), SPHKRG (SEQ ID NO: 974), SPHGAR (SEQ ID NO: 975), SPHKSA (SEQ ID NO: 977), SPHKSR (SEQ ID NO: 951), SPHSKL (SEQ ID NO: 960), SPHSRA (SEQ ID NO: 969), SPHSKR (SEQ ID NO: 978), SPHSLR (SEQ ID NO: 952), SPHSRG (SEQ ID NO: 961), SPHSSR (SEQ ID NO: 970), SPHFLR (SEQ ID NO: 979), SPHSKW (SEQ ID NO: 953), SPHSKS SPHWKA (SEQ ID NO: 7586), SPHVRR (SEQ ID NO: 980), SPHSKT (SEQ ID NO: 6647), SPHSKG (SEQ ID NO: 6648), SPHGKA (SEQ ID NO: 6649), SPHNKA (SEQ ID NO: 6650), SPHSKN (SEQ ID NO: 6651), SPHAKA (SEQ ID NO: 6652), SPHSKV (SEQ ID NO: 6653), SPHKTG (SEQ ID NO: 6654), SPHTKA (SEQ ID NO: 6655), SPHKSL (SEQ ID NO: 6656), SPHKSE (SEQ ID NO: 6657), SPHKSV (SEQ ID NO: 6658), SPHKSW (SEQ ID NO: 6659), SPHKSN (SEQ ID NO: 6660), SPHKHG (SEQ ID NO: 6661), SPHKSQ (SEQ ID NO: 6662), SPHKSK (SEQ ID NO: 6663), SPHKLW (SEQ ID NO: 6664), SPHWKG (SEQ ID NO: 6665), SPHKMG (SEQ ID NO: 6666), SPHKMA (SEQ ID NO: 6667), or SPHRSG (SEQ ID NO: 976). In some embodiments, [N2]-[N3] is SPHSKA (SEQ ID NO: 941). In some embodiments, [N2]-[N3] is or comprises SPHKSG (SEQ ID NO: 946).

[0905] In some embodiments, [N1]-[N2]-[N3] comprises SGSPHSK (SEQ ID NO: 6756), HDSPHKS (SEQ ID NO: 6757), SGSPHAR (SEQ ID NO: 6758), SGSPHVK (SEQ ID NO: 6759), QDSPHKS (SEQ ID NO: 6760), SGSPHKK (SEQ ID NO: 6761), SGSPHVR (SEQ ID NO: 6762), SGSPHAS (SEQ ID NO: 6763), SGSPHRK (SEQ ID NO: 6764), SGSPHKT (SEQ ID NO: 6765), SHSPHKS (SEQ ID NO: 6766), QSSPHRS (SEQ ID NO: 6767), RGSPHAS (SEQ ID NO: 6768), RGSPHSK (SEQ ID NO: 6769), SGSPHKF (SEQ ID NO: 6770), SGSPHKI (SEQ ID NO: 6771), SGSPHKL (SEQ ID NO: 6772), SGSPHKY (SEQ ID NO: 6773), SGSPHTR (SEQ ID NO: 6774), SHSPHKR (SEQ ID NO: 6775), SGSPHGA (SEQ ID NO: 6776), HDSPHKR (SEQ ID NO: 6777), DDSPHKS (SEQ ID NO: 6778), HESPHKS (SEQ ID NO: 6779), NYSPHKI (SEQ ID NO: 6780), SGSPHSR (SEQ ID NO: 6781), SGSPHSL (SEQ ID NO: 6782), SGSPHSS (SEQ ID NO: 6783), VGSPHSK (SEQ ID NO: 6784), SCSPHRK (SEQ ID NO: 6785), SGSPHFL (SEQ ID NO: 6786), LLSPHWK (SEQ ID NO: 6787), NGSPHSK (SEQ ID NO: 6788), PGSPHSK (SEQ ID NO: 6789), GGSPHSK (SEQ ID NO: 6790), TGSPHSK (SEQ ID NO: 6791), SVSPHGK (SEQ ID NO: 6792), SGSPHTK (SEQ ID NO: 6793), IGSPHSK (SEQ ID NO: 6794), DGSPHSK (SEQ ID NO: 6795), SGSPHNK (SEQ ID NO: 6796), LGSPHSK (SEQ ID NO: 6797), AGSPHSK (SEQ ID NO: 6798), EGSPHSK (SEQ ID NO: 6799), SASPHSK (SEQ ID NO: 6800), SGSPHAK (SEQ ID NO: 6801), HDSPHKI (SEQ ID NO: 6802), YDSPHKS (SEQ ID NO: 6803), HDSPHKT (SEQ ID NO: 6804), RGSPHKR (SEQ ID NO: 6805), HGSPHSK (SEQ ID NO: 6806), RDSPHKS (SEQ ID NO: 6807), NDSPHKS (SEQ ID NO: 6808), QDSPHKI (SEQ ID NO: 6809), PDSPHKI (SEQ ID NO: 6810), PDSPHKS (SEQ ID NO: 6811), MGSPHSK (SEQ ID NO: 6812), HDSPHKH (SEQ ID NO: 6813), QVSPHKS (SEQ ID NO: 6814), HNSPHKS (SEQ ID NO: 6815), NGSPHKR (SEQ ID NO: 6816), HDSPHKY (SEQ ID NO: 6817), NDSPHKI (SEQ ID NO: 6818), HDSPHKL (SEQ ID NO: 6819), HPSPHWK (SEQ ID NO: 6820), HDSPHKM (SEQ ID NO: 6821), or HSSPHRS (SEQ ID NO: 6822). In some embodiments, [N1]-[N2]-[N3] is GSGSPHSKA (SEQ ID NO: 6613), GHDSPHKSG (SEQ ID NO: 6615), GSGSPHARM (SEQ ID NO: 6823), GSGSPHVKS (SEQ ID NO: 6824), GQDSPHKSG (SEQ ID NO: 6825), GSGSPHASR (SEQ ID NO: 6826), GSGSPHVKI (SEQ ID NO: 6827), GSGSPHKKN (SEQ ID NO: 6828), GSGSPHVRM (SEQ ID NO: 6829), VSGSPHSKA (SEQ ID NO: 6830), CSGSPHSKA (SEQ ID NO: 6831), GSGSPHRKA (SEQ ID NO: 6832), CSGSPHKTS (SEQ ID NO: 6833), CSHSPHKSG (SEQ ID NO: 6834), GQSSPHRSG (SEQ ID NO: 6835), GRGSPHASR (SEQ ID NO: 6836), GRGSPHSKA (SEQ ID NO: 6837), GSGSPHKFG (SEQ ID NO: 6838), GSGSPHKIG (SEQ ID NO: 6839), GSGSPHKLG (SEQ ID NO: 6840), GSGSPHKTS (SEQ ID NO: 6841), GSGSPHKTT (SEQ ID NO: 6842), GSGSPHKTY (SEQ ID NO: 6843), GSGSPHKYG (SEQ ID NO: 6844), GSGSPHSKD (SEQ ID NO: 6845), GSGSPHSKP (SEQ ID NO: 6846), GSGSPHTRG (SEQ ID NO: 6847), GSGSPHVRG (SEQ ID NO: 6848), GSHSPHKRG (SEQ ID NO: 6849), GSHSPHKSG (SEQ ID NO: 6850), VSGSPHASR (SEQ ID NO: 6851), VSGSPHGAR (SEQ ID NO: 6852), VSGSPHKFG (SEQ ID NO: 6853), GHDSPHKRG (SEQ ID NO: 6854), GDDSPHKSG (SEQ ID NO: 6855), GHESPHKSA (SEQ ID NO: 6856), GHDSPHKSA (SEQ ID NO: 6857), GNYSPHKIG (SEQ ID NO: 6858), GHDSPHKSR (SEQ ID NO: 6859), GSGSPHSKL (SEQ ID NO: 6860), GSGSPHSRA (SEQ ID NO: 6861), GSGSPHSKR (SEQ ID NO: 6862), GSGSPHSLR (SEQ ID NO: 6863), GSGSPHSRG (SEQ ID NO: 6864), GSGSPHSSR (SEQ ID NO: 6865), RVGSPHSKA (SEQ ID NO: 6866), GSCSPHRKA (SEQ ID NO: 6867), GSGSPHFLR (SEQ ID NO: 6868), GSGSPHSKW (SEQ ID NO: 6869), GSGSPHSKS (SEQ ID NO: 6870), GLLSPHWKA (SEQ ID NO: 6871), GSGSPHVRR (SEQ ID NO: 6872), GSGSPHSKV (SEQ ID NO: 6873), MSGSPHSKA (SEQ ID NO: 6874), RNGSPHSKA (SEQ ID NO: 6875), TSGSPHSKA (SEQ ID NO: 6876), ISGSPHSKA (SEQ ID NO: 6877), GPGSPHSKA (SEQ ID NO: 6878), GSGSPHSKT (SEQ ID NO: 6879), ESGSPHSKA (SEQ ID NO: 6880), SSGSPHSKA (SEQ ID NO: 6881), GNGSPHSKA (SEQ ID NO: 6882), ASGSPHSKA (SEQ ID NO: 6883), NSGSPHSKA (SEQ ID NO: 6884), LSGSPHSKA (SEQ ID NO: 6885), GGGSPHSKA (SEQ ID NO: 6886), KSGSPHSKA (SEQ ID NO: 6887), GGGSPHSKS (SEQ ID NO: 6888), GSGSPHSKG (SEQ ID NO: 6889), HSGSPHSKA (SEQ ID NO: 6890), GTGSPHSKA (SEQ ID NO: 6891), PSGSPHSKA (SEQ ID NO: 6892), GSVSPHGKA (SEQ ID NO: 6893), RSGSPHSKA (SEQ ID NO: 6894), GSGSPHTKA (SEQ ID NO: 6895), GIGSPHSKA (SEQ ID NO: 6896), WSGSPHSKA (SEQ ID NO: 6897), DSGSPHSKA (SEQ ID NO: 6898), IDGSPHSKA (SEQ ID NO: 6899), GSGSPHNKA (SEQ ID NO: 6900), GLGSPHSKS (SEQ ID NO: 6901), DAGSPHSKA (SEQ ID NO: 6902), DGGSPHSKA (SEQ ID NO: 6903), MEGSPHSKA (SEQ ID NO: 6904), ENGSPHSKA (SEQ ID NO: 6905), GSASPHSKA (SEQ ID NO: 6906), GNGSPHSKS (SEQ ID NO: 6907), KNGSPHSKA (SEQ ID NO: 6908), KEGSPHSKA (SEQ ID NO: 6909), AIGSPHSKA (SEQ ID NO: 6910), GSGSPHSKN (SEQ ID NO: 6911), GSGSPHAKA (SEQ ID NO: 6912), GHDSPHKIG (SEQ ID NO: 6913), GYDSPHKSG (SEQ ID NO: 6914), GHESPHKSG (SEQ ID NO: 6915), GHDSPHKTG (SEQ ID NO: 6916), GRGSPHKRG (SEQ ID NO: 6917), GQDSPHKSG (SEQ ID NO: 6825), GHDSPHKSL (SEQ ID NO: 6918), GHGSPHSKA (SEQ ID NO: 6919), GHDSPHKSE (SEQ ID NO: 6920), VSGSPHSKA (SEQ ID NO: 6830), GRDSPHKSG (SEQ ID NO: 6921), GNDSPHKSV (SEQ ID NO: 6922), GQDSPHKIG (SEQ ID NO: 6923), GHDSPHKSV (SEQ ID NO: 6924), GPDSPHKIG (SEQ ID NO: 6925), GPDSPHKSG (SEQ ID NO: 6926), GHDSPHKSW (SEQ ID NO: 6927), GHDSPHKSN (SEQ ID NO: 6928), GMGSPHSKT (SEQ ID NO: 6929), GHDSPHKHG (SEQ ID NO: 6930), GQVSPHKSG (SEQ ID NO: 6931), GDDSPHKSV (SEQ ID NO: 6932), GHNSPHKSG (SEQ ID NO: 6933), GNGSPHKRG (SEQ ID NO: 6934), GHDSPHKYG (SEQ ID NO: 6935), GHDSPHKSQ (SEQ ID NO: 6936), GNDSPHKIG (SEQ ID NO: 6937), GHDSPHKSK (SEQ ID NO: 6938), GHDSPHKLW (SEQ ID NO: 6939), GHPSPHWKG (SEQ ID NO: 6940), GHDSPHKMG (SEQ ID NO: 6941), GHDSPHKMA (SEQ ID NO: 6942), or GHSSPHRSG (SEQ ID NO: 6943); an amino acid sequence comprising any portion of any of the aforesaid amino acid sequences (e.g., any 2, 3, 4, 5, 6, 7, or 8 amino acids, e.g., consecutive amino acids) thereof; an amino acid sequence comprising one, two, or three but no more than four modifications, e.g., substitutions (e.g., conservative substitutions), insertions, or deletions, relative to any of the aforesaid amino acid sequences; or an amino acid sequence comprising one, two, or three but no more than four different amino acids, relative to any one of the aforesaid amino acid sequences. In some embodiments, [N1]-[N2]-[N3] is or comprises GSGSPHSKA (SEQ ID NO: 6613). In some embodiments, [N1]-[N2]-[N3] is or comprises GHDSPHKSG (SEQ ID NO: 6615).

[0906] In some embodiments, the AAV capsid variant comprising an amino acid sequence having the formula [N1]-[N2]-[N3], further comprises [N4], wherein [N4] comprises X7 X8 X9 X10. In some embodiments, position X7 of [N4] is: W, Q, K, R, G, L, V, S, P, H, K, I, M, A, E, or F. In some embodiments, position X8 of [N4] is: N, Y, C, K, T, H, R, D, V, S, P, G, W, E, F, A, I, M, Q, or L. In some embodiments, position X9 of [N4] is: Q, G, K, H, R, T, L, D, A, P, I, F, V, M, W, Y, S, E, N, or Y. In some embodiments, position X10 of [N4] is: Q, H, L, R, W, K, A, P, E, M, I, S, G, N, Y, C, V, T, D, or V. In some embodiments [N4] comprises QNQQ (SEQ ID NO: 6945), WNQQ (SEQ ID NO: 6946), QYYV (SEQ ID NO: 6947), RRQQ (SEQ ID NO: 6948), GCGQ (SEQ ID NO: 6949), LRQQ (SEQ ID NO: 6950), RNQQ (SEQ ID NO: 6951), VNQQ (SEQ ID NO: 6952), FRLQ (SEQ ID NO: 6953), FNQQ (SEQ ID NO: 6954), LLQQ (SEQ ID NO: 6955), SNQQ (SEQ ID NO: 6956), RLQQ (SEQ ID NO: 6957), LNQQ (SEQ ID NO: 6958), QRKL (SEQ ID NO: 6959), LRRQ (SEQ ID NO: 6960), QRLR (SEQ ID NO: 6961), QRRL (SEQ ID NO: 6962), RRLQ (SEQ ID NO: 6963), RLRQ (SEQ ID NO: 6964), SKRQ (SEQ ID NO: 6965), QLYR (SEQ ID NO: 6966), QLTV (SEQ ID NO: 6967), QNKQ (SEQ ID NO: 6968), KNQQ (SEQ ID NO: 6969), QKQQ (SEQ ID NO: 6970), QTQQ (SEQ ID NO: 6971), QNHQ (SEQ ID NO: 6972), QHQQ (SEQ ID NO: 6973), QNQH (SEQ ID NO: 6974), QHRQ (SEQ ID NO: 6975), LTQQ (SEQ ID NO: 6976), QNQW (SEQ ID NO: 6977), QNTH (SEQ ID NO: 6978), RRRQ (SEQ ID NO: 6979), QYQQ (SEQ ID NO: 6980), QNDQ (SEQ ID NO: 6981), QNRH (SEQ ID NO: 6982), RDQQ (SEQ ID NO: 6983), PNLQ (SEQ ID NO: 6984), HVRQ (SEQ ID NO: 6985), PNQH (SEQ ID NO: 6986), HNQQ (SEQ ID NO: 6987), QSQQ (SEQ ID NO: 6988), QPAK (SEQ ID NO: 6989), QNLA (SEQ ID NO: 6990), QNQL (SEQ ID NO: 6991), QGQQ (SEQ ID NO: 6992), LNRQ (SEQ ID NO: 6993), QNPP (SEQ ID NO: 6994), QNLQ (SEQ ID NO: 6995), QDQE (SEQ ID NO: 6996), QDQQ (SEQ ID NO: 6997), HWQQ (SEQ ID NO: 6998), PNQQ (SEQ ID NO: 6999), PEQQ (SEQ ID NO: 7000), QRTM (SEQ ID NO: 7001), LHQH (SEQ ID NO: 7002), QHRI (SEQ ID NO: 7003), QYIH (SEQ ID NO: 7004), QKFE (SEQ ID NO: 7005), QFPS (SEQ ID NO: 7006), QNPL (SEQ ID NO: 7007), QAIK (SEQ ID NO: 7008), QNRQ (SEQ ID NO: 7009), QYQH (SEQ ID NO: 7010), QNPQ (SEQ ID NO: 7011), QHQL (SEQ ID NO: 7012), QSPP (SEQ ID NO: 7013), QAKL (SEQ ID NO: 7014), KSQQ (SEQ ID NO: 7015), QDRP (SEQ ID NO: 7016), QNLG (SEQ ID NO: 7017), QAFH (SEQ ID NO: 7018), QNAQ (SEQ ID NO: 7019), HNQL (SEQ ID NO: 7020), QKLN (SEQ ID NO: 7021), QNVQ (SEQ ID NO: 7022), QAQQ (SEQ ID NO: 7023), QTPP (SEQ ID NO: 7024), QPPA (SEQ ID NO: 7025), QERP (SEQ ID NO: 7026), QDLQ (SEQ ID NO: 7027), QAMH (SEQ ID NO: 7028), QHPS (SEQ ID NO: 7029), PGLQ (SEQ ID NO: 7030), QGIR (SEQ ID NO: 7031), QAPA (SEQ ID NO: 7032), QIPP (SEQ ID NO: 7033), QTQL (SEQ ID NO: 7034), QAPS (SEQ ID NO: 7035), QNTY (SEQ ID NO: 7036), QDKQ (SEQ ID NO: 7037), QNHL (SEQ ID NO: 7038), QIGM (SEQ ID NO: 7039), LNKQ (SEQ ID NO: 7040), PNQL (SEQ ID NO: 7041), QLQQ (SEQ ID NO: 7042), QRMS (SEQ ID NO: 7043), QGIL (SEQ ID NO: 7044), QDRQ (SEQ ID NO: 7045), RDWQ (SEQ ID NO: 7046), QERS (SEQ ID NO: 7047), QNYQ (SEQ ID NO: 7048), QRTC (SEQ ID NO: 7049), QIGH (SEQ ID NO: 7050), QGAI (SEQ ID NO: 7051), QVPP (SEQ ID NO: 7052), QVQQ (SEQ ID NO: 7053), LMRQ (SEQ ID NO: 7054), QYSV (SEQ ID NO: 7055), QAIT (SEQ ID NO: 7056), QKTL (SEQ ID NO: 7057), QLHH (SEQ ID NO: 7058), QNII (SEQ ID NO: 7059), QGHH (SEQ ID NO: 7060), QSKV (SEQ ID NO: 7061), QLPS (SEQ ID NO: 7062), IGKQ (SEQ ID NO: 7063), QAIH (SEQ ID NO: 7064), QHGL (SEQ ID NO: 7065), QFMC (SEQ ID NO: 7066), QNQM (SEQ ID NO: 7067), QHLQ (SEQ ID NO: 7068), QPAR (SEQ ID NO: 7069), QSLQ (SEQ ID NO: 7070), QSQL (SEQ ID NO: 7071), HSQQ (SEQ ID NO: 7072), QMPS (SEQ ID NO: 7073), QGSL (SEQ ID NO: 7074), QVPA (SEQ ID NO: 7075), HYQQ (SEQ ID NO: 7076), QVPS (SEQ ID NO: 7077), RGEQ (SEQ ID NO: 7078), PGQQ (SEQ ID NO: 7079), LEQQ (SEQ ID NO: 7080), QNQS (SEQ ID NO: 7081), QKVI (SEQ ID NO: 7082), QNND (SEQ ID NO: 7083), QSVH (SEQ ID NO: 7084), QPLG (SEQ ID NO: 7085), HNQE (SEQ ID NO: 7086), QIQQ (SEQ ID NO: 7087), QVRN (SEQ ID NO: 7088), PSNQ (SEQ ID NO: 7089), QVGH (SEQ ID NO: 7090), QRDI (SEQ ID NO: 7091), QMPN (SEQ ID NO: 7092), RGLQ (SEQ ID NO: 7093), PSLQ (SEQ ID NO: 7094), QRDQ (SEQ ID NO: 7095), QAKG (SEQ ID NO: 7096), QSAH (SEQ ID NO: 7097), QSTM (SEQ ID NO: 7098), QREM (SEQ ID NO: 7099), QYRA (SEQ ID NO: 7100), QRQQ (SEQ ID NO: 7101), QWQQ (SEQ ID NO: 7102), QRMN (SEQ ID NO: 7103), GDSQ (SEQ ID NO: 7104), QKIS (SEQ ID NO: 7105), PSMQ (SEQ ID NO: 7106), SPRQ (SEQ ID NO: 7107), MEQQ (SEQ ID NO: 7108), QYQN (SEQ ID NO: 7109), QIRQ (SEQ ID NO: 7110), QSVQ (SEQ ID NO: 7111), RSQQ (SEQ ID NO: 7112), QNKL (SEQ ID NO: 7113), QIQH (SEQ ID NO: 7114), PRQQ (SEQ ID NO: 7115), HTQQ (SEQ ID NO: 7116), QRQH (SEQ ID NO: 7117), RNQE (SEQ ID NO: 7118), QSKQ (SEQ ID NO: 7119), QNQP (SEQ ID NO: 7120), QSPQ (SEQ ID NO: 7121), QTRQ (SEQ ID NO: 7122), QNLH (SEQ ID NO: 7123), QNQE (SEQ ID NO: 7124), LNQP (SEQ ID NO: 7125), QNQD (SEQ ID NO: 7126), QNLL (SEQ ID NO: 7127), QLVI (SEQ ID NO: 7128), RTQE (SEQ ID NO: 7129), QTHQ (SEQ ID NO: 7130), QDQH (SEQ ID NO: 7131), QSQH (SEQ ID NO: 7132), VRQQ (SEQ ID NO: 7133), AWQQ (SEQ ID NO: 7134), QSVP (SEQ ID NO: 7135), QNIQ (SEQ ID NO: 7136), LDQQ (SEQ ID NO: 7137), PDQQ (SEQ ID NO: 7138), ESQQ (SEQ ID NO: 7139), QRQL (SEQ ID NO: 7140), QIIV (SEQ ID NO: 7141), QKQS (SEQ ID NO: 7142), QSHQ (SEQ ID NO: 7143), QFVV (SEQ ID NO: 7144), QSQP (SEQ ID NO: 7145), QNEQ (SEQ ID NO: 7146), INQQ (SEQ ID NO: 7147), RNRQ (SEQ ID NO: 7148), RDQK (SEQ ID NO: 7149), QWKR (SEQ ID NO: 7150), ENRQ (SEQ ID NO: 7151), QTQP (SEQ ID NO: 7152), QKQL (SEQ ID NO: 7153), RNQL (SEQ ID NO: 7154), ISIQ (SEQ ID NO: 7155), QTVC (SEQ ID NO: 7156), QQIM (SEQ ID NO: 7157), LNHQ (SEQ ID NO: 7158), QNQA (SEQ ID NO: 7159), QMIH (SEQ ID NO: 7160), RNHQ (SEQ ID NO: 7161), or QKMN (SEQ ID NO: 7162), or any dipeptide or tripeptide thereof. In some embodiments, [N1]-[N2]-[N3]-[N4] is or comprises: the amino acid sequence of any of SEQ ID NOs: 1800-2241; an amino acid sequence comprising any portion of any of the aforesaid amino acid sequences (e.g., any 2, 3, 4, 5, 6, 7, 8, 9, 10, 11, or 12 amino acids, e.g., consecutive amino acids) thereof; an amino acid sequence comprising one, two, or three but no more than four modifications, e.g., substitutions (e.g., conservative substitutions), insertions, or deletions, relative to any of the aforesaid amino acid sequences; or an amino acid sequence comprising one, two, or three but no more than four different amino acids, relative to any one of the aforesaid amino acid sequences. In some embodiments, [N1]-[N2]-[N3]-[N4] is or comprises GSGSPHSKAQNQQ (SEQ ID NO: 1801). In some embodiments, [N1]-[N2]-[N3]-[N4] is or comprises GHDSPHKSGQNQQ (SEQ ID NO: 1800).

[0907] In some embodiments, the AAV capsid variant comprising an amino acid sequence having the formula [N1]-[N2]-[N3], further comprises [N0], wherein [N0] comprises XA XB and XC. In some embodiments, XA of [N0] is: T, S, Y, M, A, C, I, R, L, D, F, V, Q, N, H, E, or G. In some embodiments, XB of [N0] is: I, M, P, E, N, D, S, A, T, G, Q, F, V, L, C, H, R, W, or L. In some embodiments, XC of [N0] is: N, M, E, G, Y, W, T, I, Q, F, V, A, L, I, P, K, R, H, S, D, or S. In some embodiments, [N0] comprises TIN, SMN, TIM, YLS, GLS, MPE, MEG, MEY, AEW, CEW, ANN, IPE, ADM, IEY, ADY, IET, MEW, CEY, RIN, MEI, LEY, ADW, IEI, DIM, FEQ, MEF, CDQ, LPE, IEN, MES, AEI, VEY, IIN, TSN, IEV, MEM, AEV, MDA, VEW, AEQ, LEW, MEL, MET, MEA, IES, MEV, CEI, ATN, MDG, QEV, ADQ, NMN, IEM, ISN, TGN, QQQ, HDW, IEG, TII, TFP, TEK, EIN, TVN, TFN, SIN, TER, TSY, ELH, AIN, SVN, TDN, TFH, TVH, TEN, TSS, TID, TCN, NIN, TEH, AEM, AIK, TDK, TFK, SDQ, TEI, NTN, TET, SIK, TEL, TEA, TAN, TIY, TFS, TES, TTN, TED, TNN, EVH, TIS, TVR, TDR, TIK, NHI, TIP, ESD, TDL, TVP, TVI, AEH, NCL, TVK, NAD, TIT, NCV, TIR, NAL, VIN, TIQ, TEF, TRE, QGE, SEK, NVN, GGE, EFV, SDK, TEQ, EVQ, TEY, NCW, TDV, SDI, NSI, NSL, EVV, TEP, SEL, TWQ, TEV, AVN, GVL, TLN, TEG, TRD, NAI, AEN, AET, ETA, NNL, or any dipeptide thereof. In some embodiments, [N0]-[N1]-[N2]-[N3]-[N4] is or comprises the amino acid sequence of any one of SEQ ID NOs: 2242-2886; an amino acid sequence comprising any portion of any of the aforesaid amino acid sequences (e.g., any 2, 3, 4, 5, 6, 7, 8, 9, 10, 11, 12, 13, 14, or 15 amino acids, e.g., consecutive amino acids) thereof; an amino acid sequence comprising one, two, or three but no more than four modifications, e.g., substitutions (e.g., conservative substitutions), insertions, or deletions, relative to any of the aforesaid amino acid sequences; or an amino acid sequence comprising one, two, or three but no more than four different amino acids, relative to any one of the aforesaid amino acid sequences. In some embodiments, [N0]-[N1]-[N2]-[N3]-[N4] is or comprises TINGSGSPHSKAQNQQ (SEQ ID NO: 2242). In some embodiments, [N0]-[N1]-[N2]-[N3]-[N4] is or comprises TINGHDSPHKSGQNQQ (SEQ ID NO: 2243).

[0908] In some embodiments, [N1]-[N2]-[N3] is present in loop IV of the AAV capsid variant. In some embodiments [N0] and [N4] are present in loop IV of the AAV capsid variant. In some embodiments, [N0]-[N1]-[N2]-[N3]-[N4] is present in loop IV of the AAV capsid variant.

[0909] In some embodiments, [N0] is present immediately subsequent to position 449, relative to a reference sequence numbered according to the amino acid sequence of SEQ ID NO: 138. In some embodiments, wherein [N0] is present immediately subsequent to position 449, relative to a reference sequence numbered according to the amino acid sequence of SEQ ID NO: 981 or 982. In some embodiments, [N0] replaces positions 450, 451, and 452 (e.g., amino acids T450, I451, and N452), relative to a reference sequence numbered according to SEQ ID NO: 138, 981, or 982. In some embodiments, [N0] is present immediately subsequent to position 449 and wherein [N0] replaces positions 450-452 (e.g., T450, I451, and N452), relative to a reference sequence numbered according to SEQ ID NO: 138, 981, or 982. In some embodiments, [N1] is present immediately subsequent to position 452, relative to a reference sequence numbered according to the amino acid sequence of SEQ ID NO: 138, 981 or 982. In some embodiments, wherein [N1] replaces positions 453-455 (e.g., G453, 5454, and G455), relative to a reference sequence numbered according to SEQ ID NO: 138, 981, or 982. In some embodiments, [N1] is present immediately subsequent to position 452 and wherein [N1] replaces positions 453-455 (e.g., G453, S454, and G455), relative to a reference sequence numbered according to SEQ ID NO: 138, 981, or 982. In some embodiments, [N2] is present immediately subsequent to position 455, relative to a reference sequence numbered according to the amino acid sequence of SEQ ID NO: 138, 981, or 982. In some embodiments, [N2]-[N3] is present immediately subsequent to position 455, relative to a reference sequence numbered according to the amino acid sequence of SEQ ID NO: 138, 981, or 982. In some embodiments [N1]-[N2]-[N3] is present immediately subsequent to position 452, numbered relative to SEQ ID NO: 138, 981, or 982. In some embodiments, [N1]-[N2]-[N3] replaces positions 453-455 (e.g., G453, S454, and G455), relative to a reference sequence numbered according to SEQ ID NO: 138, 981, or 982. In some embodiments, [N1] is present immediately subsequent to position 452 and wherein [N1]-[N2]-[N3] replaces positions 453-455 (e.g., G453, S454, and G455), relative to a reference sequence numbered according to SEQ ID NO: 138, 981, or 982. In some embodiments, [N4] is present immediately subsequent to position 455, relative to a reference sequence numbered according to the amino acid sequence of SEQ ID NO: 138. In some embodiments, [N4] replaces positions 456-459 (e.g., Q456, N457, Q458, and Q459), relative to a reference sequence numbered according to the amino acid sequence of SEQ ID NO: 138. In some embodiments, [N4] is present immediately subsequent to position 455, and [N4] replaces positions 456-459 (e.g., Q456, N457, Q458, and Q459), relative to a reference sequence numbered according to the amino acid sequence of SEQ ID NO: 138. In some embodiments, [N2]-[N3]-[N4] replaces positions 456-459 (e.g., Q456, N457, Q458, and Q459), relative to a reference sequence numbered according to the amino acid sequence of SEQ ID NO: 138. In some embodiments, [N2]-[N3]-[N4] is present immediately subsequent to position 455, and wherein [N2]-[N3]-[N4] replaces positions 456-459 (e.g., Q456, N457, Q458, and Q459), relative to a reference sequence numbered according to the amino acid sequence of SEQ ID NO: 138. In some embodiments, [N1]-[N2]-[N3]-[N4] replaces positions 453-459 (e.g., G453, S454, G455, Q456, N457, Q458, and Q459), relative to a reference sequence numbered according to the amino acid sequence of SEQ ID NO: 138. In some embodiments, [N1]-[N2]-[N3]-[N4] is present immediately subsequent to position 452, and wherein [N1]-[N2]-[N3]-[N4] replaces positions 453-459 (e.g., G453, S454, G455, Q456, N457, Q458, and Q459), relative to a reference sequence numbered according to the amino acid sequence of SEQ ID NO: 138. In some embodiments, [N0]-[N1]-[N2]-[N3]-[N4] replaces positions 450-459 (e.g., T450, I451, N452, G453, S454, G455, Q456, N457, Q458, and Q459), relative to a reference sequence numbered according to the amino acid sequence of SEQ ID NO: 138. In some embodiments, [N0]-[N1]-[N2]-[N3]-[N4] is present immediately subsequent to position 449, and wherein [N0]-[N1]-[N2]-[N3]-[N4] replaces positions 450-459 (e.g., T450, I451. N452, G453, S454, G455, Q456, N457, Q458, and Q459), relative to a reference sequence numbered according to the amino acid sequence of SEQ ID NO: 138.

[0910] In some embodiments, [N3] is present immediately subsequent to [N2].

[0911] In some embodiments, the AAV capsid variant comprises from N-terminus to C-terminus, [N2]-[N3]. In some embodiments, the AAV capsid variant comprises from N-terminus to C-terminus, [N1]-[N2]-[N3]. In some embodiments, the AAV capsid variant comprises from N-terminus to C-terminus, [N1]-[N2]-[N3]-[N4]. In some embodiments, the AAV capsid variant comprises from N-terminus to C-terminus, [N0]-[N1]-[N2]-[N3]. In some embodiments, the AAV capsid variant comprises from N-terminus to C-terminus, [N0]-[N1]-[N2]-[N3]-[N4].

[0912] In some embodiments, an AAV capsid variant described herein comprises an amino acid sequence comprising at least 3, 4, 5, 6, 7, 8, 9, 10, 11, 12, 13, 16, or 17 consecutive amino acids from any one of the sequences provided in Tables 1A, 2A, 2B, 15, or 16. In some embodiments, the AAV capsid variant comprises an amino acid sequence comprising at least 3, 4, or 5 consecutive amino acids from any one of SEQ ID NOs: 945-980 or 985-986. In some embodiments, the AAV capsid variant comprises an amino acid sequence comprising at least 3, 4, 5, 6, 7, 8, 9, 10, 11, 12, or 13 consecutive amino acids from any one of SEQ ID NOs: 200, 201, 941, 943, 204, 208, 404, or 903-909. In some embodiments, the amino acid sequence is present in loop IV. In some embodiments, the amino acid sequence is present immediately subsequent to position 448, 452, 453, 455, relative to a reference sequence numbered according to the amino acid sequence of SEQ ID NO: 138, 981, or 982. In some embodiments, the amino acid sequence is present immediately subsequent to position 455, numbered according to SEQ ID NO: 982. In some embodiments, the amino acid sequence is present immediately subsequent to position 455, numbered according to SEQ ID NO: 138. In some embodiments, the amino acid sequence is present immediately subsequent to position 453, numbered according to SEQ ID NO: 981. In some embodiments, the amino acid sequence is present immediately subsequent to position 453, numbered according to SEQ ID NO: 138. In some embodiments, the amino acid sequence replaces 1, 2, 3, 4, 5, 6, 7, 8, 9, 10, 11, or all of positions 499 (e.g., K499), 450 (e.g., T450), 451 (e.g., I451), 452 (e.g., N452), 453 (e.g., G453), 454 (e.g., S454), 455 (e.g., G455), 456 (e.g., Q456), 457 (e.g., N457), 458 (e.g., Q458), 459 (e.g., Q459), and 460 (e.g., T460), numbered according to SEQ ID NO: 138. In some embodiments, the AAV capsid variant comprises one or more amino acid substitutions at positions 499 (e.g., K499), 450 (e.g., T450), 451 (e.g., I451), 452 (e.g., N452), 453 (e.g., G453), 454 (e.g., S454), 455 (e.g., G455), 456 (e.g., Q456), 457 (e.g., N457), 458 (e.g., Q458), 459 (e.g., Q459), and 460 (e.g., T460), numbered according to SEQ ID NO: 138.

[0913] In some embodiments, the 3 consecutive amino acids comprise SPH. In some embodiments, the 4 consecutive amino acids comprise SPHS (SEQ ID NO: 6616). In some embodiments, the 5 consecutive amino acids comprise SPHSK (SEQ ID NO: 6617). In some embodiments, the 6 consecutive amino acids comprise SPHSKA (SEQ ID NO: 941).

[0914] In some embodiments, 3 consecutive amino acids comprise HDS. In some embodiments, the 4 consecutive amino acids comprise HDSP (SEQ ID NO: 6618). In some embodiments, the 5 consecutive amino acids comprise HDSPH (SEQ ID NO: 6619). In some embodiments, the 6 consecutive amino acids comprise HDSPHK (SEQ ID NO: 2).

[0915] In some embodiments, an AAV capsid variant described herein comprises an amino acid sequence comprising at least one, two, or three but no more than four modifications, e.g., substitutions (e.g., conservative substitutions), insertions, or deletions, relative to the amino acid sequence of any one of the sequences provided in Tables 1A, 2A, 2B, 15, or 16. In some embodiments, the AAV capsid variant comprises an amino acid sequence comprising at least one, two, or three but no more than four different amino acids, relative to the amino acid sequence of any one of the sequences provided in Tables 1A, 2A, 2B, 15, or 16. In some embodiments, the AAV capsid variant comprises an amino acid sequence comprising at least one, two, or three but no more than four modifications, e.g., substitutions (e.g., conservative substitutions), insertions, or deletions, relative to the amino acid sequence of any one of SEQ ID NOs: 945-980 or 985-986. In some embodiments, the AAV capsid variant comprises an amino acid sequence comprising at least one, two, or three but no more than four different amino acids, relative to the amino acid sequence of any one of SEQ ID NOs: 945-980 or 985-986. In some embodiments, the AAV capsid variant comprises an amino acid sequence comprising at least one, two, or three but no more than four modifications, e.g., substitutions (e.g., conservative substitutions), insertions, or deletions, relative to the amino acid sequence of any one of SEQ ID NOs: 2, 200, 201, 941, 943, 204, 208, 404, or 903-909. In some embodiments, the AAV capsid variant comprises an amino acid sequence comprising at least one, two, or three but no more than four different amino acids, from the amino acid sequence of any one of SEQ ID NOs: 2, 200, 201, 941, 943, 204, 208, 404, or 903-909. In some embodiments, the amino acid sequence is present in loop IV. In some embodiments, the amino acid sequence is present immediately subsequent to position 448, 452, 453, 455, relative to a reference sequence numbered according to the amino acid sequence of SEQ ID NO: 138, 981, or 982. In some embodiments, the amino acid sequence is present immediately subsequent to position 455, numbered according to SEQ ID NO: 982. In some embodiments, the amino acid sequence is present immediately subsequent to position 455, numbered according to SEQ ID NO: 138. In some embodiments, the amino acid sequence is present immediately subsequent to position 453, numbered according to SEQ ID NO: 981. In some embodiments, the amino acid sequence is present immediately subsequent to position 453, numbered according to SEQ ID NO: 138. In some embodiments, the amino acid sequence replaces 1, 2, 3, 4, 5, 6, 7, 8, 9, 10, 11, or all of positions 499 (e.g., K499), 450 (e.g., T450), 451 (e.g., I451), 452 (e.g., N452), 453 (e.g., G453), 454 (e.g., S454), 455 (e.g., G455), 456 (e.g., Q456), 457 (e.g., N457), 458 (e.g., Q458), 459 (e.g., Q459), and 460 (e.g., T460), numbered according to SEQ ID NO: 138.

[0916] In some embodiments, the AAV capsid variant comprises an amino acid sequence comprising at least one, two, or three but no more than four modifications, e.g., substitutions (e.g., conservative substitutions), insertions, or deletions, relative to the amino acid sequence of SPHSKA (SEQ ID NO: 941). In some embodiments, the AAV capsid variant comprises an amino acid sequence comprising at least one, two, or three, but no more than four different amino acids from the amino acid sequence of SPHSKA (SEQ ID NO: 941).

[0917] In some embodiments, the AAV capsid variant comprises an amino acid sequence comprising at least one, two, or three but no more than four modifications, e.g., substitutions (e.g., conservative substitutions), insertions, or deletions, relative to the amino acid sequence of HDSPHK (SEQ ID NO: 2). In some embodiments, the AAV capsid variant comprises an amino acid sequence comprising at least one, two, or three, but no more than four different amino acids that relative to the amino acid sequence of HDSPHK (SEQ ID NO: 2).

[0918] In some embodiments, the AAV capsid variant, comprises the amino acid sequence of any of the sequences provided in Tables 1A, 2A, 2B, 15, or 16. In some embodiments, the peptide comprises the amino acid sequence of any of SEQ ID NOs: 945-980 or 985-986. In some embodiments, the AAV capsid variant comprises the amino acid sequence of any of SEQ ID NOs: 2, 200, 201, 941, 943, 204, 208, 404, or 903-909. In some embodiments, the AAV capsid variant comprises the amino acid sequence of SEQ ID NO: 2. In some embodiments, the AAV capsid variant comprises the amino acid sequence of SEQ ID NO: 941. In some embodiments, the AAV capsid variant comprises the amino acid sequence of SEQ ID NO: 943. In some embodiments, the AAV capsid variant comprises the amino acid sequence of SEQ ID NO: 3589. In some embodiments, the AAV capsid variant comprises the amino acid sequence of SEQ ID NO: 1754. In some embodiments, the AAV capsid variant comprises the amino acid sequence of SEQ ID NO: 3241. In some embodiments, the AAV capsid variant comprises the amino acid sequence of SEQ ID NO: 4100. In some embodiments, the AAV capsid variant comprises the amino acid sequence of SEQ ID NO: 4062. In some embodiments, the AAV capsid variant comprises the amino acid sequence of SEQ ID NO: 4486. In some embodiments, the amino acid sequence is present in loop IV. In some embodiments, the amino acid sequence is present immediately subsequent to position 448, relative to a reference sequence numbered according to the amino acid sequence of SEQ ID NO: 138. In some embodiments, the amino acid sequence replaces positions 449-460 (e.g., K449, T450, I451, N452, G453, 5454, G455, Q456, N457, Q458, Q459, and T460), numbered relative to SEQ ID NO: 138. In some embodiments, the amino acid sequence is present immediately subsequent to position 448 and replaces positions 449-460 (e.g., K449, T450, I451, N452, G453, S454, G455, Q456, N457, Q458, Q459, and T460), numbered relative to SEQ ID NO: 138. In some embodiments, the amino acid sequence is present immediately subsequent to position 449, relative to a reference sequence numbered according to the amino acid sequence of SEQ ID NO: 138. In some embodiments, the amino acid sequence replaces positions 450-460 (e.g., T450, I451, N452, G453, S454, G455, Q456, N457, Q458, Q459, and T460), numbered relative to SEQ ID NO: 138. In some embodiments, the amino acid sequence is present immediately subsequent to position 449, and replaces positions 450-460 (e.g., T450, I451, N452, G453, S454, G455, Q456, N457, Q458, Q459, and T460), numbered relative to SEQ ID NO: 138. In some embodiments, the amino acid sequence is present immediately subsequent to position 450, relative to a reference sequence numbered according to the amino acid sequence of SEQ ID NO: 138. In some embodiments, the amino acid sequence replaces positions 451-460 (e.g., I451, N452, G453, S454, G455, Q456, N457, Q458, Q459, and T460), numbered relative to SEQ ID NO: 138. In some embodiments, the amino acid sequence is present immediately subsequent to position 450 and replaces positions 451-460 (e.g., I451, N452, G453, S454, G455, Q456, N457, Q458, Q459, and T460), numbered relative to SEQ ID NO: 138. In some embodiments, the amino acid sequence is present immediately subsequent to position 451, relative to a reference sequence numbered according to the amino acid sequence of SEQ ID NO: 138. In some embodiments, the amino acid sequence replaces positions 452-460 (e.g., N452, G453, S454, G455, Q456, N457, Q458, Q459, and T460), numbered relative to SEQ ID NO: 138. In some embodiments, the amino acid sequence is present immediately subsequent to position 451 and replaces positions 452-460 (e.g., N452, G453, S454, G455, Q456, N457, Q458, Q459, and T460), numbered relative to SEQ ID NO: 138. In some embodiments, the amino acid sequence is present immediately subsequent to position 452, relative to a reference sequence numbered according to the amino acid sequence of SEQ ID NO: 138. In some embodiments, the amino acid sequence replaces positions 453-460 (e.g., G453, S454, G455, Q456, N457, Q458, Q459, and T460), numbered relative to SEQ ID NO: 138. In some embodiments, the amino acid sequence is present immediately subsequent to position 452, and replaces positions 453-460 (e.g., G453, S454, G455, Q456, N457, Q458, Q459, and T460), numbered relative to SEQ ID NO: 138. In some embodiments, the amino acid sequence is present immediately subsequent to position 453, relative to a reference sequence numbered according to the amino acid sequence of SEQ ID NO: 138. In some embodiments, the amino acid sequence replaces positions 454 and 455 (e.g., S454 and G455), numbered according to SEQ ID NO: 138. In some embodiments, the amino acid sequence is present immediately subsequent to position 453, and replaces positions 454 and 455 (e.g., S454 and G455), numbered according to SEQ ID NO: 138. In some embodiments, the amino acid sequence replaces positions 454-460 (e.g., S454, G455, Q456, N457, Q458, Q459, and T460), numbered relative to SEQ ID NO: 138. In some embodiments, the amino acid sequence is present immediately subsequent to position 453, and replaces positions 454-460 (e.g., 5454, G455, Q456, N457, Q458, Q459, and T460), numbered relative to SEQ ID NO: 138. In some embodiments, the amino acid sequence is present immediately subsequent to position 454, relative to a reference sequence numbered according to the amino acid sequence of SEQ ID NO: 138. In some embodiments, the amino acid sequence is present immediately subsequent to position 454, relative to a reference sequence numbered according to the amino acid sequence of SEQ ID NO: 981. In some embodiments, the amino acid sequence replaces positions 455-460 (e.g., positions G455, Q456, N457, Q458, Q459, and T460), numbered relative to SEQ ID NO: 138. In some embodiments, the amino acid sequence is present immediately subsequent to positions 454, and replaces positions 455-460 (e.g., positions G455, Q456, N457, Q458, Q459, and T460), numbered relative to SEQ ID NO: 138. In some embodiments, the amino acid sequence is present immediately subsequent to position 455, relative to a reference sequence numbered according to the amino acid sequence of SEQ ID NO: 138. In some embodiments, the amino acid sequence is present immediately subsequent to position 455, relative to a reference sequence numbered according to the amino acid sequence of SEQ ID NO: 982. In some embodiments, the amino acid sequence replaces positions 456-460 (e.g., Q456, N457, Q458, Q459, and T460), numbered relative to SEQ ID NO: 138. In some embodiments, the amino acid sequence is present immediately subsequent to position 455, and replaces positions 456-460 (e.g., Q456, N457, Q458, Q459, and T460), numbered relative to SEQ ID NO: 138.

[0919] In some embodiments, the AAV capsid variant (e.g., an AAV capsid variant described herein), comprises an amino acid sequence encoded by the nucleotide sequence of SEQ ID NO: 3 or 942, or a nucleotide sequence substantially identical (e.g., having at least 70%, 75%, 80%, 85%, 90%, 92%, 95%, 97%, 98%, or 99% sequence identity) thereto. In some embodiments, the AAV capsid variant described herein, comprises an amino acid sequence encoded by the nucleotide sequence of SEQ ID NO: 3 or 942, or a nucleotide sequence comprising at least one, two, three, four, five, six, or seven modifications, e.g., substitutions (e.g., conservative substitutions), insertions, or deletions, but no more than ten modifications, e.g., substitutions (e.g., conservative substitutions), insertions, or deletions, relative to the nucleotide sequence of SEQ ID NO: 3 or 942. In some embodiments, the AAV capsid variant comprises an amino acid sequence encoded by a nucleotide sequence comprising at least one, two, three, four, five, six, or seven, but no more than ten different nucleotides relative to the nucleotide sequence of SEQ ID NO: 3 or 942.

[0920] In some embodiments, the nucleotide sequence encoding the AAV capsid variant (e.g., an AAV capsid variant described herein), comprises the nucleotide sequence of SEQ ID NO: 942, or a nucleotide sequence substantially identical (e.g., having at least 70%, 75%, 80%, 85%, 90%, 92%, 95%, 97%, 98%, or 99% sequence identity) thereto. In some embodiments, the nucleic acid sequence encoding the AAV capsid variant comprises a nucleotide sequence comprising at least one, two, three, four, five, six, or seven modifications, e.g., substitutions (e.g., conservative substitutions), insertions, or deletions, but no more than ten modifications, e.g., substitutions (e.g., conservative substitutions), insertions, or deletions, relative to the nucleotide sequences of SEQ ID NO: 942. In some embodiments, the nucleotide sequence encoding an AAV capsid variant described herein comprises a nucleotide sequence comprising at least one, two, three, four, five, six, or seven, but no more than ten different nucleotides, relative to the nucleotide sequence of SEQ ID NO: 942.

[0921] In some embodiments, the nucleotide sequence encoding the AAV capsid variant (e.g., an AAV capsid variant described herein), comprises the nucleotide sequence of SEQ ID NO: 3, or a nucleotide sequence substantially identical (e.g., having at least 70%, 75%, 80%, 85%, 90%, 92%, 95%, 97%, 98%, or 99% sequence identity) thereto. In some embodiments, the nucleic acid sequence encoding the AAV capsid variant comprises a nucleotide sequence comprising at least one, two, three, four, five, six, or seven modifications, e.g., substitutions (e.g., conservative substitutions), insertions, or deletions, but no more than ten modifications, e.g., substitutions (e.g., conservative substitutions), insertions, or deletions, relative to the nucleotide sequences of SEQ ID NO: 3. In some embodiments, the nucleotide sequence encoding an AAV capsid variant described herein comprises a nucleotide sequence comprising at least one, two, three, four, five, six, or seven, but no more than ten different nucleotides relative to the nucleotide sequence of SEQ ID NO: 3.

[0922] In some embodiments, an AAV capsid variant described herein comprises the amino acid sequence of SPHSKA (SEQ ID NO: 941), wherein the amino acid sequence is present immediately subsequent to position 455, relative to a reference sequence numbered according to the amino acid sequence of SEQ ID NO: 138. In some embodiments, an AAV capsid variant described herein comprises the amino acid sequence of SPHSKA (SEQ ID NO: 941), wherein the amino acid sequence is present immediately subsequent to position 455, relative to a reference sequence numbered according to the amino acid sequence of SEQ ID NO: 981.

[0923] In some embodiments, an AAV capsid variant described herein comprises the amino acid sequence of HDSPHK (SEQ ID NO: 2), wherein the amino acid sequence is present immediately subsequent to position 453, relative to a reference sequence numbered according to the amino acid sequence of SEQ ID NO: 138. In some embodiments, an AAV capsid variant described herein comprises the amino acid sequence of HDSPHK (SEQ ID NO: 2), wherein the amino acid sequence is present immediately subsequent to position 453, relative to a reference sequence numbered according to the amino acid sequence of SEQ ID NO: 982.

[0924] In some embodiments, an AAV capsid variant described herein comprises (i) the amino acid sequence of HDSPHK (SEQ ID NO: 2), which is present immediately subsequent to position 453; and (ii) a deletion of amino acids SG at position 454 and 455; wherein (i) and (ii) are numbered according to SEQ ID NO: 138.

[0925] In some embodiments, an AAV capsid variant described herein comprises an amino acid other than S at position 454 and/or an amino acid other than G at position 455, numbered according to SEQ ID NO: 138. In some embodiments, the AAV capsid variant comprises the amino acid H at position 454 and the amino acid D at position 455, numbered according to SEQ ID NO: 138. In some embodiments, the AAV capsid variant further comprises the amino acid sequence of SPHSKA (SEQ ID NO: 941). In some embodiments, the AAV capsid variant comprises: (i) the amino acid H at position 454 and the amino acid D at position 455, and (ii) the amino acid sequence SPHSKA (SEQ ID NO: 941), wherein the amino acid sequence of SPHSKA (SEQ ID NO: 941) is present immediately subsequent to position 455, wherein (i) and (ii) are numbered according to SEQ ID NO: 138.

[0926] In some embodiments, an AAV capsid variant described herein comprises a modification, e.g., substitution, relative to SEQ ID NO: 138. In some embodiments, the AAV capsid variant comprises a modification, e.g., substitution, at position S454 and/or G455, numbered relative to SEQ ID NO: 138. In some embodiments, the AAV capsid variant comprises a S454H substitution and/or G455D substitution, numbered relative to SEQ ID NO: 138. In some embodiments, the AAV capsid variant comprises a S454H substitution and a G455D substitution, numbered relative to SEQ ID NO: 138. In some embodiments, the AAV capsid variant further comprises the amino acid sequence of SPHSKA (SEQ ID NO: 941). In some embodiments, the AAV capsid variant comprises: (i) a S454H substitution and a G455D substitution, and (ii) the amino acid sequence SPHSKA (SEQ ID NO: 941), wherein the amino acid sequence of SPHSKA (SEQ ID NO: 941) is present immediately subsequent to position 455, wherein (i) and (ii) are numbered according to SEQ ID NO: 138.

[0927] In some embodiments, the AAV capsid variant further comprises one, two, or all of an amino acid other than T at position 450 (e.g., S, Y, or G), an amino acid other than I at position 451 (e.g., M or L), and/or an amino acid other than N at position 452 (e.g., S), relative to a reference sequence numbered according to the amino acid sequence of SEQ ID NO: 138. In some embodiments, the AAV capsid variant further comprises an S at position 450 and an M at position 451, relative to a reference sequence numbered according to the amino acid sequence of SEQ ID NO: 138. In some embodiments, the AAV capsid variant further comprises a Y at position 450, an L at position 451, and an S at position 452, relative to a reference sequence numbered according to the amino acid sequence of SEQ ID NO: 138. In some embodiments, the AAV capsid variant further comprises a G at position 450, an L at position 451, and an S at position 452, relative to a reference sequence numbered according to the amino acid sequence of SEQ ID NO: 138.

[0928] In some embodiments, the AAV capsid variant further comprises one, two, three, four, or all of an amino acid other than Q at position 456 (e.g., R or L), N at position 457 (e.g., H, K, or R), Q at position 458 (e.g., R or T), Q at position 459 (H), and/or T at position 460 (N or S), relative to a reference sequence numbered according to the amino acid sequence of SEQ ID NO: 138. In some embodiments, the AAV capsid variant further comprises an R at position 456, relative to a reference sequence numbered according to the amino acid sequence of SEQ ID NO: 138. In some embodiments, the AAV capsid variant further comprises an L at position 456, relative to a reference sequence numbered according to the amino acid sequence of SEQ ID NO: 138. In some embodiments, the AAV capsid variant further comprises an H at position 457 and an R at position 458, relative to a reference sequence numbered according to the amino acid sequence of SEQ ID NO: 138. In some embodiments, the AAV capsid variant further comprises a K at position 457 and an N at position 460, relative to a reference sequence numbered according to the amino acid sequence of SEQ ID NO: 138. In some embodiments, the AAV capsid variant further comprises a T at position 458, an H at position 459, and an S at position 460, relative to a reference sequence numbered according to the amino acid sequence of SEQ ID NO: 138. In some embodiments, the AAV capsid variant further comprises an R at position 456, an R at position 457, and an R at position 458, relative to a reference sequence numbered according to the amino acid sequence of SEQ ID NO: 138.

[0929] In some embodiments, an capsid variant described herein comprises an amino acid other than I at position 451, an amino acid other than N at position 452, and an amino acid other than G at position 453, numbered according to SEQ ID NO: 138 or 981. In some embodiments, the AAV capsid variant comprises E at position 451, R at position 452, and V at position 453, numbered according to SEQ ID NO: 138 or 981. In some embodiments, the AAV capsid variant comprises the substitutions I451E, N452R, and G453V, numbered according to SEQ ID NO: 138 or 981.

[0930] In some embodiments, the AAV capsid variant comprises the amino acid sequence of SPHSKA (SEQ ID NO: 941), wherein the amino acid sequence is present immediately subsequent to position 455 and wherein the AAV capsid variant comprises the E at position 451, R at position 452, and V at position 453, numbered according to the amino acid sequence of SEQ ID NO: 138 or 981. In some embodiments, the AAV capsid variant comprises the substitutions I451E, N452R, and G453V, and further comprises the amino acid sequence of SPHSKA (SEQ ID NO: 941), wherein the amino acid sequence is present immediately subsequent to position 455, all numbered according to SEQ ID NO: 138 or 981. In some embodiments, the AAV capsid variant comprises the amino acid sequence of ERVSGSPHSKA (SEQ ID NO: 7581), and wherein the amino acid sequence is present immediately subsequent to position 449 and replaces positions 450-455, numbered according to SEQ ID NO: 138. In some embodiments, the AAV capsid variant comprises the amino acid sequence of KTERVSGSPHSKAQNQQT (SEQ ID NO: 3589), wherein the amino acid sequence is present immediately subsequent to position 448 and replaces positions 449-460, numbered according to SEQ ID NO: 138.

[0931] In some embodiments, an AAV capsid variant described herein comprises an amino acid other than T at position 450, an amino acid other than I at position 451, and an amino acid other than N at position 452, numbered according to SEQ ID NO: 138 or 982. In some embodiments, the AAV capsid variant comprises A at position 450, E at position 451, and I at position 452, numbered according to SEQ ID NO: 138 or 982. In some embodiments, the AAV capsid variant comprises the substitutions T450A, I451E, and N452I, numbered according to SEQ ID NO: 138 or 982.

[0932] In some embodiments, the AAV capsid variant comprises the amino acid sequence of SPHKSG (SEQ ID NO: 946), which is present immediately subsequent to positions 455, and further comprises A at position 450, E at position 451, I at position 452, H at position 454, and D at position 455, all numbered according to SEQ ID NO: 138 or 982. In some embodiments, the AAV capsid variant comprises the substitutions T450A, I451E, or N452I, and further comprises the amino acid sequence HDSPHK (SEQ ID NO: 2) present immediately subsequent to position 453, all numbered according to SEQ ID NO: 138 or 982. In some embodiments, the AAV capsid variant comprises the amino acid sequence of AEIGHDSPHKSG (SEQ ID NO: 7582), wherein the amino acid sequence is present immediately subsequent to position 449 and replaces positions 450-455, numbered according to SEQ ID NO: 138. In some embodiments, the AAV capsid variant comprises the amino acid sequence of KAEIGHDSPHKSGQNQQT (SEQ ID NO: 1754), wherein the amino acid sequence is present immediately subsequent to position 448 and replaces positions 449-460, numbered according to SEQ ID NO: 138.

[0933] In some embodiments, the AAV capsid variant, further comprises a substitution at position K449, e.g., a K449R substitution, numbered according to SEQ ID NO: 138. In some embodiments, the AAV capsid variant, further comprises an amino acid other than K at position 449 (e.g., R), relative to a reference sequence numbered according to the amino acid sequence of SEQ ID NO: 138. In some embodiments, the AAV capsid variant comprises an R at position 449, relative to a reference sequence numbered according to the amino acid sequence of SEQ ID NO: 138. In some embodiments, the AAV capsid variant further comprises a modification, e.g., an insertion, substitution, and/or deletion in loop I, II, VI, and/or VIII.

[0934] In some embodiments, the AAV capsid variant, further comprises an amino acid sequence comprising at least one, two or three modifications, e.g., substitutions (e.g., conservative substitutions), insertions, or deletions, but not more than 30, 20 or 10 modifications, e.g., substitutions (e.g., conservative substitutions), insertions, or deletions, of the amino acid sequence of SEQ ID NO: 138. In some embodiments, the AAV capsid variant, further comprises an amino acid sequence comprising at least one, two or three, but not more than 30, 20 or 10 amino acids that differ from the amino acid sequence of SEQ ID NO: 138. In some embodiments, the AAV capsid variant further comprises the amino acid sequence of SEQ ID NO: 138, or an amino acid sequence with at least 70% (e.g., at least about 80, 85, 90, 95, 96, 97, 98, or 99%) sequence identity thereto.

[0935] In some embodiments, the AAV capsid variant further comprises (a) a VP1 protein comprising the amino acid sequence of SEQ ID NO: 138, 981, or 982; (b) a VP2 protein comprising the amino acid sequence of positions 138-736 of SEQ ID NO: 138 or positions 138-742 of SEQ ID NO: 981 or 982; (c) a VP3 protein comprising the amino acid sequence of positions 203-736 of SEQ ID NO: 138 or positions 203-742 of SEQ ID NO: 981 or 982; or (d) an amino acid sequence with at least 70% (e.g., at least about 80, 85, 90, 95, 96, 97, 98, or 99%) sequence identity to any of the amino acid sequences in (a)-(c), an amino acid sequence comprising at least one, two or three, but not more than 30, 20 or 10 different amino acids relative to any of the amino acid sequences in (a)-(c), or an amino acid sequence comprising at least one, two or three modifications, e.g., substitutions (e.g., conservative substitutions), insertions, or deletions, but not more than 30, 20 or 10 modifications, e.g., substitutions (e.g., conservative substitutions), insertions, or deletions, relative to any of the amino acid sequences in (a)-(c).

[0936] In some embodiments, the AAV capsid variant further comprises an amino acid sequence encoded by the nucleotide sequence of SEQ ID NO: 137, or a sequence with at least 70% (e.g., at least about 80, 85, 90, 95, 96, 97, 98, or 99%) sequence identity thereto. In some embodiments, the AAV capsid variant further comprises an amino acid sequence encoded by a nucleotide sequence comprising at least one, two or three modifications, e.g., substitutions (e.g., conservative substitutions), insertions, or deletions, but not more than 30, 20 or 10 modifications, e.g., substitutions (e.g., conservative substitutions), insertions, or deletions, relative to the nucleotide sequence of SEQ ID NO: 137. In some embodiments, the AAV capsid variant further comprises an amino acid sequence encoded by a nucleotide sequence comprising at least one, two or three, but not more than 30, 20 or 10 different nucleotides, relative to the amino acid sequence of SEQ ID NO: 137.

[0937] In some embodiments, the nucleotide sequence encoding the AAV capsid variant further comprises the nucleotide sequence of SEQ ID NO: 137, or a sequence with at least 70% (e.g., at least about 80, 85, 90, 95, 96, 97, 98, or 99%) sequence identity thereto. In some embodiments, the nucleotide sequence encoding the AAV capsid variant further comprises a nucleotide sequence comprising at least one, two or three modifications, e.g., substitutions (e.g., conservative substitutions), insertions, or deletions, but not more than 30, 20 or 10 modifications, e.g., substitutions (e.g., conservative substitutions), insertions, or deletions, relative to the nucleotide sequence of SEQ ID NO: 137. In some embodiments, the nucleotide sequence encoding the AAV capsid variant further comprises a nucleotide sequence comprising at least one, two or three, but not more than 30, 20 or 10 different nucleotides, relative to the amino acid sequence of SEQ ID NO: 137.

[0938] In some embodiments, an AAV capsid variant of the present disclosure comprises an amino acid sequence as described herein, e.g., an amino acid sequence of an AAV capsid variant of TTM-001 or TTM-002, e.g., as described in Tables 3 and 4. In some embodiments, an AAV capsid variant of the present disclosure comprises an amino acid sequence as described herein, e.g., an amino acid sequence of an AAV capsid variant of TTM-003, TTM-004, TTM-005, TTM-006, TTM-007, TTM-008, TTM-009, TTM-010, TTM-011, TTM-012, TTM-013, TTM-014, TTM-015, TTM-016, TTM-017, TTM-018, TTM-019, TTM-020, TTM-021, TTM-022, TTM-023, TTM-024, TTM-025, or TTM-026, e.g., as described in Table 4.

[0939] In some embodiments, an AAV capsid variant described herein comprises a VP1, VP2, and/or VP3 protein comprising an amino acid sequence described herein, e.g., an amino acid sequence of an AAV capsid variant of TTM-001 or TTM-002, e.g., as described in Tables 3 and 4. In some embodiments, an AAV capsid variant described herein comprises a VP1, VP2, and/or VP3 protein comprising an amino acid sequence described herein, e.g., an amino acid sequence of an AAV capsid variant of TTM-003, TTM-004, TTM-005, TTM-006, TTM-007, TTM-008, TTM-009, TTM-010, TTM-011, TTM-012, TTM-013, TTM-014, TTM-015, TTM-016, TTM-017, TTM-018, TTM-019, TTM-020, TTM-021, TTM-022, TTM-023, TTM-024, TTM-025, or TTM-026, e.g., as described in Table 4. In some embodiments, an AAV capsid variant described herein comprises an amino acid sequence encoded by a nucleotide sequence as described herein, e.g., a nucleotide sequence of an AAV capsid variant of TTM-001 or TTM-002, e.g., as described in Tables 3 and 5. In some embodiments, an AAV capsid variant described herein comprises an amino acid sequence encoded by a nucleotide sequence as described herein, e.g., a nucleotide sequence of an AAV capsid variant of TTM-003, TTM-004, TTM-005, TTM-006, TTM-007, TTM-008, TTM-009, TTM-010, TTM-011, TTM-012, TTM-013, TTM-014, TTM-015, TTM-016, TTM-017, TTM-018, TTM-019, TTM-020, TTM-021, TTM-022, TTM-023, TTM-024, TTM-025, or TTM-026, e.g., as described in Table 5.

[0940] Sn some embodiments, a polynucleotide or nucleic acid encoding an AAV capsid variant, of the present disclosure comprises a nucleotide sequence described herein, e.g., a nucleotide sequence of an AAV capsid variant of TTM-001 or TTM-002, e.g., as described in Tables 3 and 5. In some embodiments, a polynucleotide or nucleic acid encoding an AAV capsid variant, of the present disclosure comprises a nucleotide sequence described herein, e.g., a nucleotide sequence of an AAV capsid variant of TTM-003, TTM-004, TTM-005, TTM-006, TTM-007, TTM-008, TTM-009, TTM-010, TTM-011, TTM-012, TTM-013, TTM-014, TTM-015, TTM-016, TTM-017, TTM-018, TTM-019, TTM-020, TTM-021, TTM-022, TTM-023, TTM-024, TTM-025, or TTM-026, e.g., as described in Table 5.

TABLE 3
Exemplary full length capsid sequences

| | VP1 | VP1 | Peptide | Peptide |
|---|---|---|---|---|
| | DNA SEQ | (amino acid) | (amino acid) | DNA SEQ |
| Name | ID NO: | SEQ ID NO: | SEQ ID NO: | ID NO: |
| TTM-001 | 983 | 981 | 941 | 942 |
| TTM-002 | 984 | 982 | 2 | 3 |

TABLE 4
Exemplary full length capsid amino acid sequences

| | SEQ | |
|---|---|---|
| Name and | ID | |
| Annotation | NO: | Amino Acid Sequence |
| TTM-001 | 981 | MAADGYLPDWLEDNLSEGIREWWALKPGAPQPKANQQHQDNARGLVLPGYKYLGPG |
| 6 mer peptide | | NGLDKGEPVNAADAAALEHDKAYDQQLKAGDNPYLKYNHADAEFQERLKEDTSFGG |
| underlined, | | NLGRAVFQAKKRLLEPLGLVEEAAKTAPGKKRPVEQSPQEPDSSAGIGKSGAQPAK |
| starts at | | KRLNFGQTGDTESVPDPQPIGEPPAAPSGVGSLTMASGGGAPVADNNEGADGVGSS |
| position 456 | | SGNWHCDSQWLGDRVITTSTRTWALPTYNNHLYKQISNSTSGGSSNDNAYFGYSTP |
| (immediately | | WGYFDFNRFHCHFSPRDWORLINNNWGFRPKRLNFKLFNIQVKEVTDNNGVKTIAN |
| subsequent to | | NLTSTVQVFTDSDYQLPYVLGSAHEGCLPPFPADVEMIPQYGYLTLNDGSQAVGRS |
| position 455); | | SFYCLEYFPSQMLRTGNNFQFSYEFENVPFHSSYAHSQSLDRLMNPLIDQYLYYLS |
| 742 aa | | KTINGSGSPHSKAQNQQTLKFSVAGPSNMAVOGRNYIPGPSYRQQRVSTTVTONNN |
| | | SEFAWPGASSWALNGRNSLMNPGPAMASHKEGEDRFFPLSGSLIFGKQGTGRDNVD |
| | | ADKVMITNEEEIKTTNPVATESYGQVATNHQSAQAQAQTGWVQNQGILPGMVWQDR |
| | | DVYLQGPIWAKIPHTDGNFHPSPLMGGFGMKHPPPQILIKNTPVPADPPTAFNKDK |
| | | LNSFITQYSTGQVSVEIEWELQKENSKRWNPEIQYTSNYYKSNNVEFAVNTEGVYS |
| | | EPRPIGTRYLTRNL |
| TTM-002 | 982 | MAADGYLPDWLEDNLSEGIREWWALKPGAPQPKANQQHODNARGLVLPGYKYLGPG |
| 6 mer peptide | | NGLDKGEPVNAADAAALEHDKAYDQQLKAGDNPYLKYNHADAEFQERLKEDTSFGG |
| underlined, | | NLGRAVFQAKKRLLEPLGLVEEAAKTAPGKKRPVEQSPQEPDSSAGIGKSGAQPAK |
| starts at | | KRLNFGQTGDTESVPDPQPIGEPPAAPSGVGSLTMASGGGAPVADNNEGADGVGSS |
| position 454 | | SGNWHCDSQWLGDRVITTSTRTWALPTYNNHLYKQISNSTSGGSSNDNAYFGYSTP |
| (immediately | | WGYFDFNRFHCHFSPRDWORLINNNWGFRPKRLNFKLFNIQVKEVTDNNGVKTIAN |
| subsequent to | | NLTSTVQVFTDSDYQLPYVLGSAHEGCLPPFPADVFMIPQYGYLTLNDGSQAVGRS |
| position 453); | | SFYCLEYFPSQMLRTGNNFQFSYEFENVPFHSSYAHSQSLDRLMNPLIDQYLYYLS |
| 742 aa | | KTINGHDSPHKSGQNQQTLKFSVAGPSNMAVOGRNYIPGPSYRQQRVSTTVTQNNN |
| | | SEFAWPGASSWALNGRNSLMNPGPAMASHKEGEDRFFPLSGSLIFGKQGTGRDNVD |
| | | ADKVMITNEEEIKTTNPVATESYGQVATNHQSAQAQAQTGWVQNQGILPGMVWQDR |
| | | DVYLQGPIWAKIPHTDGNFHPSPLMGGFGMKHPPPQILIKNTPVPADPPTAFNKDK |
| | | LNSFITQYSTGQVSVEIEWELQKENSKRWNPEIQYTSNYYKSNNVEFAVNTEGVYS |
| | | EPRPIGTRYLTRNL |
| TTM-003 | 36 | MAADGYLPDWLEDNLSEGIREWWALKPGAPQPKANQQHQDNARGLVLPGYKYLGPG |
| 6 mer peptide | | NGLDKGEPVNAADAAALEHDKAYDQQLKAGDNPYLKYNHADAEFQERLKEDTSFGG |
| underlined, | | NLGRAVFQAKKRLLEPLGLVEEAAKTAPGKKRPVEQSPQEPDSSAGIGKSGAQPAK |
| starts at | | KRLNFGQTGDTESVPDPQPIGEPPAAPSGVGSLTMASGGGAPVADNNEGADGVGSS |
| position 456 | | SGNWHCDSQWLGDRVITTSTRTWALPTYNNHLYKQISNSTSGGSSNDNAYFGYSTP |
| (immediately | | WGYFDFNRFHCHFSPRDWQRLINNNWGFRPKRLNFKLFNIQVKEVTDNNGVKTIAN |
| subsequent to | | NLTSTVQVFTDSDYQLPYVLGSAHEGCLPPFPADVFMIPQYGYLTLNDGSQAVGRS |
| position 455); | | SFYCLEYFPSQMLRTGNNFQFSYEFENVPFHSSYAHSQSLDRLMNPLIDQYLYYLS |
| modifications at | | KTERVSGSPHSKAQNQQTLKFSVAGPSNMAVOGRNYIPGPSYRQQRVSTTVTONNN |
| positions 451, | | SEFAWPGASSWALNGRNSLMNPGPAMASHKEGEDRFFPLSGSLIFGKQGTGRDNVD |
| 452, and 453 | | ADKVMITNEEEIKTTNPVATESYGQVATNHQSAQAQAQTGWVQNQGILPGMVWQDR |
| underlined; | | DVYLQGPIWAKIPHTDGNFHPSPLMGGFGMKHPPPQILIKNTPVPADPPTAFNKDK |
| 742 aa | | LNSFITQYSTGQVSVEIEWELQKENSKRWNPEIQYTSNYYKSNNVEFAVNTEGVYS |
| | | EPRPIGTRYLTRNL |
| TTM-004 | 37 | MAADGYLPDWLEDNLSEGIREWWALKPGAPQPKANQQHQDNARGLVLPGYKYLGPG |
| 6 mer peptide | | NGLDKGEPVNAADAAALEHDKAYDQQLKAGDNPYLKYNHADAEFQERLKEDTSFGG |
| underlined, | | NLGRAVFQAKKRLLEPLGLVEEAAKTAPGKKRPVEQSPQEPDSSAGIGKSGAQPAK |
| starts at | | KRLNFGQTGDTESVPDPQPIGEPPAAPSGVGSLTMASGGGAPVADNNEGADGVGSS |
| position 454 | | SGNWHCDSQWLGDRVITTSTRTWALPTYNNHLYKQISNSTSGGSSNDNAYFGYSTP |
| (immediately | | WGYFDFNRFHCHFSPRDWORLINNNWGFRPKRLNFKLFNIQVKEVTDNNGVKTIAN |
| subsequent to | | NLTSTVQVFTDSDYQLPYVLGSAHEGCLPPFPADVFMIPQYGYLTLNDGSQAVGRS |
| position 453); | | SFYCLEYFPSQMLRTGNNFQFSYEFENVPFHSSYAHSQSLDRLMNPLIDQYLYYLS |
| modifications at | | KAEIGHDSPHKSGQNQQTLKFSVAGPSNMAVQGRNYIPGPSYRQQRVSTTVTQNNN |
| positions 450, | | SEFAWPGASSWALNGRNSLMNPGPAMASHKEGEDRFFPLSGSLIFGKQGTGRDNVD |
| 451, and 452 | | ADKVMITNEEEIKTTNPVATESYGQVATNHQSAQAQAQTGWVQNQGILPGMVWQDR |
| underlined; | | DVYLQGPIWAKIPHTDGNFHPSPLMGGFGMKHPPPQILIKNTPVPADPPTAFNKDK |
| 742 aa | | LNSLITQYSTGQVSVEIEWELQKENSKRWNPEIQYTSNYYKSNNVEFAVNTEGVYS |
| | | EPRPIGTRYLTRNL |
| TTM-005 | 38 | MAADGYLPDWLEDNLSEGIREWWALKPGAPQPKANQQHQDNARGLVLPGYKYLGPG |
| 6 mer peptide | | NGLDKGEPVNAADAAALEHDKAYDQQLKAGDNPYLKYNHADAEFQERLKEDTSFGG |
| underlined, | | NLGRAVFQAKKRLLEPLGLVEEAAKTAPGKKRPVEQSPQEPDSSAGIGKSGAQPAK |
| starts at | | KRLNFGQTGDTESVPDPQPIGEPPAAPSGVGSLTMASGGGAPVADNNEGADGVGSS |
| position 456 | | SGNWHCDSQWLGDRVITTSTRTWALPTYNNHLYKQISNSTSGGSSNDNAYFGYSTP |
| (immediately | | WGYFDFNRFHCHFSPRDWORLINNNWGFRPKRLNFKLFNIQVKEVTDNNGVKTIAN |
| subsequent to | | NLTSTVQVFTDSDYQLPYVLGSAHEGCLPPFPADVFMIPQYGYLTLNDGSQAVGRS |
| position 455); | | SFYCLEYFPSQMLRTGNNFQFSYEFENVPFHSSYAHSQSLDRLMNPLIDQYLYYLS |
| modifications at | | KTIIGSGSPHSKAQNRHTLKFSVAGPSNMAVOGRNYIPGPSYRQQRVSTTVTQNNN |
| positions 452, | | SEFAWPGASSWALNGRNSLMNPGPAMASHKEGEDRFFPLSGSLIFGKQGTGRDNVD |
| 464, and 465 | | ADKVMITNEEEIKTTNPVATESYGQVATNHQSAQAQAQTGWVQNQGILPGMVWQDR |
| underlined; | | DVYLQGPIWAKIPHTDGNFHPSPLMGGFGMKHPPPQILIKNTPVPADPPTAFNKDK |
| 742 aa | | LNSFITQYSTGQVSVEIEWELQKENSKRWNPEIQYTSNYYKSNNVEFAVNTEGVYS |
| | | EPRPIGTRYLTRNL |
| TTM-006 | 39 | MAADGYLPDWLEDNLSEGIREWWALKPGAPQPKANQQHODNARGLVLPGYKYLGPG |
| 6 mer peptide | | NGLDKGEPVNAADAAALEHDKAYDQQLKAGDNPYLKYNHADAEFQERLKEDTSEGG |
| underlined, | | NLGRAVFQAKKRLLEPLGLVEEAAKTAPGKKRPVEQSPQEPDSSAGIGKSGAQPAK |
| starts at | | KRLNFGQTGDTESVPDPQPIGEPPAAPSGVGSLTMASGGGAPVADNNEGADGVGSS |
| position 456 | | SGNWHCDSQWLGDRVITTSTRTWALPTYNNHLYKQISNSTSGGSSNDNAYFGYSTP |
| (immediately | | WGYFDFNRFHCHFSPRDWORLINNNWGFRPKRLNFKLFNIQVKEVTDNNGVKTIAN |
| subsequent to | | NLTSTVQVFTDSDYQLPYVLGSAHEGCLPPFPADVFMIPQYGYLTLNDGSQAVGRS |
| position 455); | | SFYCLEYFPSQMLRTGNNFQFSYEFENVPFHSSYAHSQSLDRLMNPLIDQYLYYLS |
| modifications at | | KTEKMSGSPHSKAQNQQTLKFSVAGPSNMAVQGRNYIPGPSYRQQRVSTTVTQNNN |
| positions 451, | | SEFAWPGASSWALNGRNSLMNPGPAMASHKEGEDRFFPLSGSLIFGKQGTGRDNVD |
| 452, and 453 | | ADKVMITNEEEIKTTNPVATESYGQVATNHQSAQAQAQTGWVQNQGILPGMVWQDR |
| underlined; | | DVYLQGPIWAKIPHTDGNFHPSPLMGGFGMKHPPPQILIKNTPVPADPPTAFNKDK |
| 742 aa | | LNSFITQYSTGQVSVEIEWELQKENSKRWNPEIQYTSNYYKSNNVEFAVNTEGVYS |
| | | EPRPIGTRYLTRNL |
| TTM-007 | 40 | MAADGYLPDWLEDNLSEGIREWWALKPGAPQPKANQQHQDNARGLVLPGYKYLGPG |
| 6 mer peptide | | NGLDKGEPVNAADAAALEHDKAYDQQLKAGDNPYLKYNHADAEFQERLKEDTSFGG |
| underlined, | | NLGRAVFQAKKRLLEPLGLVEEAAKTAPGKKRPVEQSPQEPDSSAGIGKSGAQPAK |
| starts at | | KRLNFGQTGDTESVPDPQPIGEPPAAPSGVGSLTMASGGGAPVADNNEGADGVGSS |
| position 456 | | SGNWHCDSQWLGDRVITTSTRTWALPTYNNHLYKQISNSTSGGSSNDNAYFGYSTP |
| (immediately | | WGYFDFNRFHCHFSPRDWORLINNNWGFRPKRLNFKLFNIQVKEVTDNNGVKTIAN |
| subsequent to | | NLTSTVQVFTDSDYQLPYVLGSAHEGCLPPFPADVFMIPQYGYLTLNDGSQAVGRS |
| position 455); | | SFYCLEYFPSQMLRTGNNFQFSYEFENVPFHSSYAHSQSLDRLMNPLIDQYLYYLS |
| modifications at | | KEINGRGSPHSKAQNQQTLKFSVAGPSNMAVQGRNYIPGPSYRQQRVSTTVTQNNN |
| positions 450 | | SEFAWPGASSWALNGRNSLMNPGPAMASHKEGEDRFFPLSGSLIFGKQGTGRDNVD |
| and 454 | | ADKVMITNEEEIKTTNPVATESYGQVATNHQSAQAQAQTGWVONQGILPGMVWQDR |
| underlined; | | DVYLQGPIWAKIPHTDGNFHPSPLMGGFGMKHPPPQILIKNTPVPADPPTAFNKDK |
| 742 aa | | LNSFITQYSTGQVSVEIEWELQKENSKRWNPEIQYTSNYYKSNNVEFAVNTEGVYS |
| | | EPRPIGTRYLTRNL |
| TTM-008 | 41 | MAADGYLPDWLEDNLSEGIREWWALKPGAPQPKANQQHQDNARGLVLPGYKYLGPG |
| 6 mer peptide | | NGLDKGEPVNAADAAALEHDKAYDQQLKAGDNPYLKYNHADAEFQERLKEDTSFGG |
| underlined, | | NLGRAVFQAKKRLLEPLGLVEEAAKTAPGKKRPVEQSPQEPDSSAGIGKSGAQPAK |
| starts at | | KRLNFGQTGDTESVPDPQPIGEPPAAPSGVGSLTMASGGGAPVADNNEGADGVGSS |
| position 456 | | SGNWHCDSQWLGDRVITTSTRTWALPTYNNHLYKQISNSTSGGSSNDNAYFGYSTP |
| (immediately | | WGYFDFNRFHCHFSPRDWQRLINNNWGFRPKRLNFKLFNIQVKEVTDNNGVKTIAN |
| subsequent to | | NLTSTVQVFTDSDYQLPYVLGSAHEGCLPPFPADVFMIPQYGYLTLNDGSQAVGRS |
| position 455); | | SFYCLEYFPSQMLRTGNNFQFSYEFENVPFHSSYAHSQSLDRLMNPLIDQYLYYLS |
| modifications at | | KTFNGSGSPHSKAPNLQTLKFSVAGPSNMAVQGRNYIPGPSYRQQRVSTTVTONNN |
| positions 451, | | SEFAWPGASSWALNGRNSLMNPGPAMASHKEGEDRFFPLSGSLIFGKQGTGRDNVD |
| 462, and 464 | | ADKVMITNEEEIKTTNPVATESYGQVATNHQSAQAQAQTGWVQNQGILPGMVWQDR |
| underlined; | | DVYLQGPIWAKIPHTDGNFHPSPLMGGFGMKHPPPQILIKNTPVPADPPTAFNKDK |
| 742 aa | | LNSFITQYSTGQVSVEIEWELQKENSKRWNPEIQYTSNYYKSNNVEFAVNTEGVYS |
| | | EPRPIGTRYLTRNL |
| TTM-009 | 42 | MAADGYLPDWLEDNLSEGIREWWALKPGAPQPKANQQHQDNARGLVLPGYKYLGPG |
| 6 mer peptide | | NGLDKGEPVNAADAAALEHDKAYDQQLKAGDNPYLKYNHADAEFQERLKEDTSEGG |
| underlined, | | NLGRAVFQAKKRLLEPLGLVEEAAKTAPGKKRPVEQSPQEPDSSAGIGKSGAQPAK |
| starts at | | KRLNFGQTGDTESVPDPQPIGEPPAAPSGVGSLTMASGGGAPVADNNEGADGVGSS |
| position 456 | | SGNWHCDSQWLGDRVITTSTRTWALPTYNNHLYKQISNSTSGGSSNDNAYFGYSTP |
| (immediately | | WGYFDFNRFHCHFSPRDWORLINNNWGFRPKRLNFKLFNIQVKEVTDNNGVKTIAN |
| subsequent to | | NLTSTVQVFTDSDYQLPYVLGSAHEGCLPPFPADVFMIPQYGYLTLNDGSQAVGRS |
| position 455); | | SFYCLEYFPSQMLRTGNNFQFSYEFENVPFHSSYAHSQSLDRLMNPLIDQYLYYLS |
| modifications at | | KTEKTSGSPHSKAQNQQTLKFSVAGPSNMAVOGRNYIPGPSYRQQRVSTTVTONNN |
| positions 451, | | SEFAWPGASSWALNGRNSLMNPGPAMASHKEGEDRFFPLSGSLIFGKQGTGRDNVD |
| 452, and 453 | | ADKVMITNEEEIKTTNPVATESYGQVATNHQSAQAQAQTGWVQNQGILPGMVWQDR |
| underlined; | | DVYLQGPIWAKIPHTDGNFHPSPLMGGFGMKHPPPQILIKNTPVPADPPTAFNKDK |
| 742 aa | | LNSFITQYSTGQVSVEIEWELQKENSKRWNPEIQYTSNYYKSNNVEFAVNTEGVYS |
| | | EPRPIGTRYLTRNL |
| TTM-010 | 43 | MAADGYLPDWLEDNLSEGIREWWALKPGAPQPKANQQHQDNARGLVLPGYKYLGPG |
| 6 mer peptide | | NGLDKGEPVNAADAAALEHDKAYDQQLKAGDNPYLKYNHADAEFQERLKEDTSFGG |
| underlined, | | NLGRAVFQAKKRLLEPLGLVEEAAKTAPGKKRPVEQSPQEPDSSAGIGKSGAQPAK |
| starts at | | KRLNFGQTGDTESVPDPQPIGEPPAAPSGVGSLTMASGGGAPVADNNEGADGVGSS |
| position 456 | | SGNWHCDSQWLGDRVITTSTRTWALPTYNNHLYKQISNSTSGGSSNDNAYFGYSTP |
| (immediately | | WGYFDFNRFHCHFSPRDWQRLINNNWGFRPKRLNFKLFNIQVKEVTDNNGVKTIAN |
| subsequent to | | NLTSTVQVFTDSDYQLPYVLGSAHEGCLPPFPADVFMIPQYGYLTLNDGSQAVGRS |
| position 455); | | SFYCLEYFPSQMLRTGNNFQFSYEFENVPFHSSYAHSQSLDRLMNPLIDQYLYYLS |
| modifications at | | KTMNGHDSPHSKAQNQQTLKFSVAGPSNMAVQGRNYIPGPSYRQQRVSTTVTQNNN |
| positions 451, | | SEFAWPGASSWALNGRNSLMNPGPAMASHKEGEDRFFPLSGSLIFGKQGTGRDNVD |
| 454, and 455 | | ADKVMITNEEEIKTTNPVATESYGQVATNHQSAQAQAQTGWVQNQGILPGMVWQDR |
| underlined; | | DVYLQGPIWAKIPHTDGNFHPSPLMGGFGMKHPPPQILIKNTPVPADPPTAFNKDK |
| 742 aa | | LNSFITQYSTGQVSVEIEWELQKENSKRWNPEIQYTSNYYKSNNVEFAVNTEGVYS |
| | | EPRPIGTRYLTRNL |
| TTM-011 | 44 | MAADGYLPDWLEDNLSEGIREWWALKPGAPQPKANQQHODNARGLVLPGYKYLGPG |
| 6 mer peptide | | NGLDKGEPVNAADAAALEHDKAYDQQLKAGDNPYLKYNHADAEFQERLKEDTSFGG |
| underlined, | | NLGRAVFQAKKRLLEPLGLVEEAAKTAPGKKRPVEQSPQEPDSSAGIGKSGAQPAK |
| starts at | | KRLNFGQTGDTESVPDPQPIGEPPAAPSGVGSLTMASGGGAPVADNNEGADGVGSS |
| position 456 | | SGNWHCDSQWLGDRVITTSTRTWALPTYNNHLYKQISNSTSGGSSNDNAYFGYSTP |
| (immediately | | WGYFDFNRFHCHFSPRDWORLINNNWGFRPKRLNFKLFNIQVKEVTDNNGVKTIAN |
| subsequent to | | NLTSTVQVFTDSDYQLPYVLGSAHEGCLPPFPADVFMIPQYGYLTLNDGSQAVGRS |
| position 455); | | SFYCLEYFPSQMLRTGNNFQFSYEFENVPFHSSYAHSQSLDRLMNPLIDOYLYYLS |
| modifications at | | KTIDGHDSPHSKAQNQQTLKFSVAGPSNMAVOGRNYIPGPSYRQQRVSTTVTQNNN |
| positions 452, | | SEFAWPGASSWALNGRNSLMNPGPAMASHKEGEDRFFPLSGSLIFGKQGTGRDNVD |
| 454, and 455 | | ADKVMITNEEEIKTTNPVATESYGQVATNHQSAQAQAQTGWVQNQGILPGMVWQDR |
| underlined; | | DVYLQGPIWAKIPHTDGNFHPSPLMGGFGMKHPPPQILIKNTPVPADPPTAFNKDK |
| 742 aa | | LNSFITQYSTGQVSVEIEWELQKENSKRWNPEIQYTSNYYKSNNVEFAVNTEGVYS |
| | | EPRPIGTRYLTRNL |
| TTM-012 | 45 | MAADGYLPDWLEDNLSEGIREWWALKPGAPQPKANQQHQDNARGLVLPGYKYLGPG |
| 6 mer peptide | | NGLDKGEPVNAADAAALEHDKAYDQQLKAGDNPYLKYNHADAEFQERLKEDTSFGG |
| underlined, | | NLGRAVFQAKKRLLEPLGLVEEAAKTAPGKKRPVEQSPQEPDSSAGIGKSGAQPAK |
| starts at | | KRLNFGQTGDTESVPDPQPIGEPPAAPSGVGSLTMASGGGAPVADNNEGADGVGSS |
| position 456 | | SGNWHCDSQWLGDRVITTSTRTWALPTYNNHLYKQISNSTSGGSSNDNAYFGYSTP |
| (immediately | | WGYFDFNRFHCHFSPRDWORLINNNWGFRPKRLNFKLFNIQVKEVTDNNGVKTIAN |
| subsequent to | | NLTSTVQVFTDSDYQLPYVLGSAHEGCLPPFPADVFMIPQYGYLTLNDGSQAVGRS |
| position 455); | | SFYCLEYFPSQMLRTGNNFQFSYEFENVPFHSSYAHSQSLDRLMNPLIDQYLYYLS |
| modifications at | | KTNNGHDSPHSKAQNQQTLKFSVAGPSNMAVQGRNYIPGPSYRQQRVSTTVTQNNN |
| positions 452, | | SEFAWPGASSWALNGRNSLMNPGPAMASHKEGEDRFFPLSGSLIFGKQGTGRDNVD |
| 454, and 455 | | ADKVMITNEEEIKTTNPVATESYGQVATNHQSAQAQAQTGWVQNQGILPGMVWQDR |
| underlined; | | DVYLOGPIWAKIPHTDGNFHPSPLMGGFGMKHPPPQILIKNTPVPADPPTAFNKDK |
| 742 aa | | LNSFITQYSTGQVSVEIEWELQKENSKRWNPEIQYTSNYYKSNNVEFAVNTEGVYS |
| | | EPRPIGTRYLTRNL |
| TTM-013 | 46 | MAADGYLPDWLEDNLSEGIREWWALKPGAPQPKANQQHQDNARGLVLPGYKYLGPG |
| 6 mer peptide | | NGLDKGEPVNAADAAALEHDKAYDQQLKAGDNPYLKYNHADAEFQERLKEDTSFGG |
| underlined, | | NLGRAVFQAKKRLLEPLGLVEEAAKTAPGKKRPVEQSPQEPDSSAGIGKSGAQPAK |
| starts at | | KRLNFGQTGDTESVPDPQPIGEPPAAPSGVGSLTMASGGGAPVADNNEGADGVGSS |
| position 456 | | SGNWHCDSQWLGDRVITTSTRTWALPTYNNHLYKQISNSTSGGSSNDNAYFGYSTP |
| (immediately | | WGYFDFNRFHCHFSPRDWORLINNNWGFRPKRLNFKLFNIQVKEVTDNNGVKTIAN |
| subsequent to | | NLTSTVQVFTDSDYQLPYVLGSAHEGCLPPFPADVFMIPQYGYLTLNDGSQAVGRS |
| position 455); | | SFYCLEYFPSQMLRTGNNFQFSYEFENVPFHSSYAHSQSLDRLMNPLIDQYLYYLS |
| modifications at | | KTQRKSGSPHSKAQNQQTLKFSVAGPSNMAVQGRNYIPGPSYRQQRVSTTVTQNNN |
| positions 451, | | SEFAWPGASSWALNGRNSLMNPGPAMASHKEGEDRFFPLSGSLIFGKQGTGRDNVD |
| 452, and 453 | | ADKVMITNEEEIKTTNPVATESYGQVATNHQSAQAQAQTGWVONQGILPGMVWQDR |
| underlined; | | DVYLOGPIWAKIPHTDGNFHPSPLMGGFGMKHPPPQILIKNTPVPADPPTAFNKDK |
| 742 aa | | LNSFITQYSTGQVSVEIEWELQKENSKRWNPEIQYTSNYYKSNNVEFAVNTEGVYS |
| | | EPRPIGTRYLTRNL |
| TTM-014 | 47 | MAADGYLPDWLEDNLSEGIREWWALKPGAPQPKANQQHQDNARGLVLPGYKYLGPG |
| 6 mer peptide | | NGLDKGEPVNAADAAALEHDKAYDQQLKAGDNPYLKYNHADAEFQERLKEDTSFGG |
| underlined, | | NLGRAVFQAKKRLLEPLGLVEEAAKTAPGKKRPVEQSPQEPDSSAGIGKSGAQPAK |
| starts at | | KRLNFGQTGDTESVPDPQPIGEPPAAPSGVGSLTMASGGGAPVADNNEGADGVGSS |
| position 456 | | SGNWHCDSQWLGDRVITTSTRTWALPTYNNHLYKQISNSTSGGSSNDNAYFGYSTP |
| (immediately | | WGYFDFNRFHCHFSPRDWORLINNNWGFRPKRLNFKLFNIQVKEVTDNNGVKTIAN |
| subsequent to | | NLTSTVQVFTDSDYQLPYVLGSAHEGCLPPFPADVFMIPQYGYLTLNDGSQAVGRS |
| position 455); | | SFYCLEYFPSQMLRTGNNFQFSYEFENVPFHSSYAHSQSLDRLMNPLIDQYLYYLS |
| modifications at | | KTINGSGSPHSKAQARKTLKFSVAGPSNMAVQGRNYIPGPSYRQQRVSTTVTQNNN |
| positions 463, | | SEFAWPGASSWALNGRNSLMNPGPAMASHKEGEDRFFPLSGSLIFGKQGTGRDNVD |
| 464, and 465 | | ADKVMITNEEEIKTTNPVATESYGQVATNHQSAQAQAQTGWVONQGILPGMVWQDR |
| underlined; | | DVYLQGPIWAKIPHTDGNFHPSPLMGGFGMKHPPPQILIKNTPVPADPPTAFNKDK |
| 742 aa | | LNSFITQYSTGQVSVEIEWELQKENSKRWNPEIQYTSNYYKSNNVEFAVNTEGVYS |
| | | EPRPIGTRYLTRNL |
| TTM-015 | 48 | MAADGYLPDWLEDNLSEGIREWWALKPGAPQPKANQQHODNARGLVLPGYKYLGPG |
| 6 mer peptide | | NGLDKGEPVNAADAAALEHDKAYDQQLKAGDNPYLKYNHADAEFQERLKEDTSFGG |
| underlined, | | NLGRAVFQAKKRLLEPLGLVEEAAKTAPGKKRPVEQSPQEPDSSAGIGKSGAQPAK |
| starts at | | KRLNFGQTGDTESVPDPQPIGEPPAAPSGVGSLTMASGGGAPVADNNEGADGVGSS |
| position 456 | | SGNWHCDSQWLGDRVITTSTRTWALPTYNNHLYKQISNSTSGGSSNDNAYFGYSTP |
| (immediately | | WGYFDFNRFHCHFSPRDWORLINNNWGFRPKRLNFKLFNIQVKEVTDNNGVKTIAN |
| subsequent to | | NLTSTVQVFTDSDYQLPYVLGSAHEGCLPPFPADVFMIPQYGYLTLNDGSQAVGRS |
| position 455); | | SFYCLEYFPSQMLRTGNNFQFSYEFENVPFHSSYAHSQSLDRLMNPLIDQYLYYLS |
| modifications at | | KYIVGSGSPHSKAQNQQTLKFSVAGPSNMAVQGRNYIPGPSYRQQRVSTTVTQNNN |
| positions 450 | | SEFAWPGASSWALNGRNSLMNPGPAMASHKEGEDRFFPLSGSLIFGKQGTGRDNVD |
| and 452 | | ADKVMITNEEEIKTTNPVATESYGQVATNHQSAQAQAQTGWVONQGILPGMVWODR |
| underlined; | | DVYLQGPIWAKIPHTDGNFHPSPLMGGFGMKHPPPQILIKNTPVPADPPTAFNKDK |
| 742 aa | | LNSFITQYSTGQVSVEIEWELQKENSKRWNPEIQYTSNYYKSNNVEFAVNTEGVYS |
| | | EPRPIGTRYLTRNL |
| TTM-016 | 49 | MAADGYLPDWLEDNLSEGIREWWALKPGAPQPKANQQHODNARGLVLPGYKYLGPG |
| 6 mer peptide | | NGLDKGEPVNAADAAALEHDKAYDQQLKAGDNPYLKYNHADAEFQERLKEDTSFGG |
| underlined, | | NLGRAVFQAKKRLLEPLGLVEEAAKTAPGKKRPVEQSPQEPDSSAGIGKSGAQPAK |
| starts at | | KRLNFGQTGDTESVPDPQPIGEPPAAPSGVGSLTMASGGGAPVADNNEGADGVGSS |
| position 456 | | SGNWHCDSQWLGDRVITTSTRTWALPTYNNHLYKQISNSTSGGSSNDNAYFGYSTP |
| (immediately | | WGYFDFNRFHCHFSPRDWORLINNNWGFRPKRLNFKLFNIQVKEVTDNNGVKTIAN |
| subsequent to | | NLTSTVQVFTDSDYQLPYVLGSAHEGCLPPFPADVFMIPQYGYLTLNDGSQAVGRS |
| position 455); | | SFYCLEYFPSQMLRTGNNFQFSYEFENVPFHSSYAHSQSLDRLMNPLIDQYLYYLS |
| modifications at | | KTISKRGSPHSKAQNQQTLKFSVAGPSNMAVQGRNYIPGPSYRQQRVSTTVTONNN |
| positions 452, | | SEFAWPGASSWALNGRNSLMNPGPAMASHKEGEDRFFPLSGSLIFGKQGTGRDNVD |
| 453, and 454 | | ADKVMITNEEEIKTTNPVATESYGQVATNHQSAQAQAQTGWVQNQGILPGMVWQDR |
| underlined; | | DVYLQGPIWAKIPHTDGNFHPSPLMGGFGMKHPPPQILIKNTPVPADPPTAFNKDK |
| 742 aa | | LNSFITQYSTGQVSVEIEWELQKENSKRWNPEIQYTSNYYKSNNVEFAVNTEGVYS |
| | | EPRPIGTRYLTRNL |
| TTM-017 | 50 | MAADGYLPDWLEDNLSEGIREWWALKPGAPQPKANQQHQDNARGLVLPGYKYLGPG |
| 6 mer peptide | | NGLDKGEPVNAADAAALEHDKAYDQQLKAGDNPYLKYNHADAEFQERLKEDTSFGG |
| underlined, | | NLGRAVFQAKKRLLEPLGLVEEAAKTAPGKKRPVEQSPQEPDSSAGIGKSGAQPAK |
| starts at | | KRLNFGQTGDTESVPDPQPIGEPPAAPSGVGSLTMASGGGAPVADNNEGADGVGSS |
| position 456 | | SGNWHCDSQWLGDRVITTSTRTWALPTYNNHLYKQISNSTSGGSSNDNAYFGYSTP |
| (immediately | | WGYFDFNRFHCHFSPRDWORLINNNWGFRPKRLNFKLFNIQVKEVTDNNGVKTIAN |
| subsequent to | | NLTSTVQVFTDSDYQLPYVLGSAHEGCLPPFPADVFMIPQYGYLTLNDGSQAVGRS |
| position 455); | | SFYCLEYFPSQMLRTGNNFQFSYEFENVPFHSSYAHSQSLDRLMNPLIDQYLYYLS |
| modifications at | | KGLGGSGSPHSKAQNQQTLKFSVAGPSNMAVQGRNYIPGPSYRQQRVSTTVTQNNN |
| positions 450, | | SEFAWPGASSWALNGRNSLMNPGPAMASHKEGEDRFFPLSGSLIFGKQGTGRDNVD |
| 451, and 452 | | ADKVMITNEEEIKTTNPVATESYGQVATNHQSAQAQAQTGWVQNQGILPGMVWQDR |
| underlined; | | DVYLQGPIWAKIPHTDGNFHPSPLMGGFGMKHPPPQILIKNTPVPADPPTAFNKDK |
| 742 aa | | LNSFITQYSTGQVSVEIEWELQKENSKRWNPEIQYTSNYYKSNNVEFAVNTEGVYS |
| | | EPRPIGTRYLTRNL |
| TTM-018 | 51 | MAADGYLPDWLEDNLSEGIREWWALKPGAPQPKANQQHODNARGLVLPGYKYLGPG |
| 6 mer peptide | | NGLDKGEPVNAADAAALEHDKAYDQQLKAGDNPYLKYNHADAEFQERLKEDTSFGG |
| underlined, | | NLGRAVFQAKKRLLEPLGLVEEAAKTAPGKKRPVEQSPQEPDSSAGIGKSGAQPAK |
| starts at | | KRLNFGQTGDTESVPDPQPIGEPPAAPSGVGSLTMASGGGAPVADNNEGADGVGSS |
| position 456 | | SGNWHCDSQWLGDRVITTSTRTWALPTYNNHLYKQISNSTSGGSSNDNAYFGYSTP |
| (immediately | | WGYFDFNRFHCHFSPRDWQRLINNNWGFRPKRLNFKLFNIQVKEVTDNNGVKTIAN |
| subsequent to | | NLTSTVQVFTDSDYQLPYVLGSAHEGCLPPFPADVFMIPQYGYLTLNDGSQAVGRS |
| position 455); | | SFYCLEYFPSQMLRTGNNFQFSYEFENVPFHSSYAHSQSLDRLMNPLIDQYLYYLS |
| modifications at | | KTINGHDSPHSKAQNLQTLKFSVAGPSNMAVOGRNYIPGPSYRQQRVSTTVTQNNN |
| positions 454, | | SEFAWPGASSWALNGRNSLMNPGPAMASHKEGEDRFFPLSGSLIFGKQGTGRDNVD |
| 455, and 464 | | ADKVMITNEEEIKTTNPVATESYGQVATNHQSAQAQAQTGWVQNQGILPGMVWQDR |
| underlined; | | DVYLQGPIWAKIPHTDGNFHPSPLMGGFGMKHPPPQILIKNTPVPADPPTAFNKDK |
| 742 aa | | LNSFITQYSTGQVSVEIEWELQKENSKRWNPEIQYTSNYYKSNNVEFAVNTEGVYS |
| | | EPRPIGTRYLTRNL |
| TTM-019 | 52 | MAADGYLPDWLEDNLSEGIREWWALKPGAPQPKANQQHQDNARGLVLPGYKYLGPG |
| 6 mer peptide | | NGLDKGEPVNAADAAALEHDKAYDQQLKAGDNPYLKYNHADAEFQERLKEDTSFGG |
| underlined, | | NLGRAVFQAKKRLLEPLGLVEEAAKTAPGKKRPVEQSPQEPDSSAGIGKSGAQPAK |
| starts at | | KRLNFGQTGDTESVPDPQPIGEPPAAPSGVGSLTMASGGGAPVADNNEGADGVGSS |
| position 456 | | SGNWHCDSQWLGDRVITTSTRTWALPTYNNHLYKQISNSTSGGSSNDNAYFGYSTP |
| (immediately | | WGYFDFNRFHCHFSPRDWORLINNNWGFRPKRLNFKLFNIQVKEVTDNNGVKTIAN |
| subsequent to | | NLTSTVQVFTDSDYQLPYVLGSAHEGCLPPFPADVFMIPQYGYLTLNDGSQAVGRS |
| position 455); | | SFYCLEYFPSQMLRTGNNFQFSYEFENVPFHSSYAHSQSLDRLMNPLIDQYLYYLS |
| modifications at | | KTVNGHDSPHSKAQNQQTLKFSVAGPSNMAVQGRNYIPGPSYRQQRVSTTVTQNNN |
| positions 451, | | SEFAWPGASSWALNGRNSLMNPGPAMASHKEGEDRFFPLSGSLIFGKQGTGRDNVD |
| 454, and 455 | | ADKVMITNEEEIKTTNPVATESYGQVATNHQSAQAQAQTGWVQNQGILPGMVWQDR |
| underlined; | | DVYLQGPIWAKIPHTDGNFHPSPLMGGFGMKHPPPQILIKNTPVPADPPTAFNKDK |
| 742 aa | | LNSFITQYSTGQVSVEIEWELQKENSKRWNPEIQYTSNYYKSNNVEFAVNTEGVYS |
| | | EPRPIGTRYLTRNL |
| TTM-020 | 53 | MAADGYLPDWLEDNLSEGIREWWALKPGAPQPKANQQHQDNARGLVLPGYKYLGPG |
| 6 mer peptide | | NGLDKGEPVNAADAAALEHDKAYDQQLKAGDNPYLKYNHADAEFQERLKEDTSFGG |
| underlined, | | NLGRAVFQAKKRLLEPLGLVEEAAKTAPGKKRPVEQSPQEPDSSAGIGKSGAQPAK |
| starts at | | KRLNFGQTGDTESVPDPQPIGEPPAAPSGVGSLTMASGGGAPVADNNEGADGVGSS |
| position 456 | | SGNWHCDSQWLGDRVITTSTRTWALPTYNNHLYKQISNSTSGGSSNDNAYFGYSTP |
| (immediately | | WGYFDFNRFHCHFSPRDWORLINNNWGFRPKRLNFKLFNIQVKEVTDNNGVKTIAN |
| subsequent to | | NLTSTVQVFTDSDYQLPYVLGSAHEGCLPPFPADVFMIPQYGYLTLNDGSQAVGRS |
| position 455); | | SFYCLEYFPSQMLRTGNNFQFSYEFENVPFHSSYAHSQSLDRLMNPLIDQYLYYLS |
| modifications at | | KTINGHDSPHSKALNQQTLKFSVAGPSNMAVQGRNYIPGPSYRQQRVSTTVTQNNN |
| positions 454, | | SEFAWPGASSWALNGRNSLMNPGPAMASHKEGEDRFFPLSGSLIFGKQGTGRDNVD |
| 455, and 462 | | ADKVMITNEEEIKTTNPVATESYGQVATNHQSAQAQAQTGWVQNQGILPGMVWQDR |
| underlined; | | DVYLQGPIWAKIPHTDGNFHPSPLMGGFGMKHPPPQILIKNTPVPADPPTAFNKDK |
| 742 aa | | LNSFITQYSTGQVSVEIEWELQKENSKRWNPEIQYTSNYYKSNNVEFAVNTEGVYS |
| | | EPRPIGTRYLTRNL |
| TTM-021 | 54 | MAADGYLPDWLEDNLSEGIREWWALKPGAPQPKANQQHODNARGLVLPGYKYLGPG |
| 6 mer peptide | | NGLDKGEPVNAADAAALEHDKAYDQQLKAGDNPYLKYNHADAEFQERLKEDTSFGG |
| underlined, | | NLGRAVFQAKKRLLEPLGLVEEAAKTAPGKKRPVEQSPQEPDSSAGIGKSGAQPAK |
| starts at | | KRLNFGQTGDTESVPDPQPIGEPPAAPSGVGSLTMASGGGAPVADNNEGADGVGSS |
| position 456 | | SGNWHCDSQWLGDRVITTSTRTWALPTYNNHLYKQISNSTSGGSSNDNAYFGYSTP |
| (immediately | | NLTSTVQVFTDSDYQLPYVLGSAHEGCLPPFPADVFMIPQYGYLTLNDGSQAVGRS |
| subsequent to | | WGYFDFNRFHCHFSPRDWORLINNNWGFRPKRLNFKLFNIQVKEVTDNNGVKTIAN |
| position 455); | | NLTSTVQVFTDSDYQLPYVLGSAHEGCLPPFPADVFMIPQYGYLTLNDGSQAVGRS |
| modifications at | | SFYCLEYFPSQMLRTGNNFQFSYEFENVPFHSSYAHSQSLDRLMNPLIDQYLYYLS |
| positions 454, | | KTINGHDSPHSKAQNQQSLKFSVAGPSNMAVQGRNYIPGPSYRQQRVSTTVTQNNN |
| 455, and 466 | | SEFAWPGASSWALNGRNSLMNPGPAMASHKEGEDRFFPLSGSLIFGKQGTGRDNVD |
| underlined; | | ADKVMITNEEEIKTTNPVATESYGQVATNHQSAQAQAQTGWVQNQGILPGMVWQDR |
| 742 aa | | DVYLOGPIWAKIPHTDGNFHPSPLMGGFGMKHPPPQILIKNTPVPADPPTAFNKDK |
| | | LNSFITQYSTGQVSVEIEWELQKENSKRWNPEIQYTSNYYKSNNVEFAVNTEGVYS |
| | | EPRPIGTRYLTRNL |
| TTM-022 | 55 | MAADGYLPDWLEDNLSEGIREWWALKPGAPQPKANQQHQDNARGLVLPGYKYLGPG |
| 6 mer peptide | | NGLDKGEPVNAADAAALEHDKAYDQQLKAGDNPYLKYNHADAEFQERLKEDTSFGG |
| underlined, | | NLGRAVFQAKKRLLEPLGLVEEAAKTAPGKKRPVEQSPQEPDSSAGIGKSGAQPAK |
| starts at | | KRLNFGQTGDTESVPDPQPIGEPPAAPSGVGSLTMASGGGAPVADNNEGADGVGSS |
| position 456 | | SGNWHCDSQWLGDRVITTSTRTWALPTYNNHLYKQISNSTSGGSSNDNAYFGYSTP |
| (immediately | | WGYFDFNRFHCHFSPRDWQRLINNNWGFRPKRLNFKLFNIQVKEVTDNNGVKTIAN |
| subsequent to | | NLTSTVQVFTDSDYQLPYVLGSAHEGCLPPFPADVFMIPQYGYLTLNDGSQAVGRS |
| position 455); | | SFYCLEYFPSQMLRTGNNFQFSYEFENVPFHSSYAHSQSLDRLMNPLIDQYLYYLS |
| modifications at | | KTINGHDSPHSKAQNQQILKFSVAGPSNMAVQGRNYIPGPSYRQQRVSTTVTQNNN |
| positions 454, | | SEFAWPGASSWALNGRNSLMNPGPAMASHKEGEDRFFPLSGSLIFGKQGTGRDNVD |
| 455, and 466 | | ADKVMITNEEEIKTTNPVATESYGQVATNHQSAQAQAQTGWVQNQGILPGMVWQDR |
| underlined; | | DVYLQGPIWAKIPHTDGNFHPSPLMGGFGMKHPPPQILIKNTPVPADPPTAFNKDK |
| 742 aa | | LNSFITQYSTGQVSVEIEWELQKENSKRWNPEIQYTSNYYKSNNVEFAVNTEGVYS |
| | | EPRPIGTRYLTRNL |
| TTM-023 | 56 | MAADGYLPDWLEDNLSEGIREWWALKPGAPQPKANQQHODNARGLVLPGYKYLGPG |
| 6 mer peptide | | NGLDKGEPVNAADAAALEHDKAYDQQLKAGDNPYLKYNHADAEFQERLKEDTSFGG |
| underlined, | | NLGRAVFQAKKRLLEPLGLVEEAAKTAPGKKRPVEQSPQEPDSSAGIGKSGAQPAK |
| starts at | | KRLNFGQTGDTESVPDPQPIGEPPAAPSGVGSLTMASGGGAPVADNNEGADGVGSS |
| position 456 | | SGNWHCDSQWLGDRVITTSTRTWALPTYNNHLYKQISNSTSGGSSNDNAYFGYSTP |
| (immediately | | WGYFDFNRFHCHFSPRDWORLINNNWGFRPKRLNFKLFNIQVKEVTDNNGVKTIAN |
| subsequent to | | NLTSTVQVFTDSDYQLPYVLGSAHEGCLPPFPADVFMIPQYGYLTLNDGSQAVGRS |
| position 455); | | SFYCLEYFPSQMLRTGNNFQFSYEFENVPFHSSYAHSQSLDRLMNPLIDQYLYYLS |
| 742 aa | | KTINGSGSPHFTRQNQQTLKFSVAGPSNMAVQGRNYIPGPSYRQQRVSTTVTONNN |
| | | SEFAWPGASSWALNGRNSLMNPGPAMASHKEGEDRFFPLSGSLIFGKQGTGRDNVD |
| | | ADKVMITNEEEIKTTNPVATESYGQVATNHQSAQAQAQTGWVONQGILPGMVWQDR |
| | | DVYLQGPIWAKIPHTDGNFHPSPLMGGFGMKHPPPQILIKNTPVPADPPTAFNKDK |
| | | LNSFITQYSTGQVSVEIEWELQKENSKRWNPEIQYTSNYYKSNNVEFAVNTEGVYS |
| | | EPRPIGTRYLTRNL |
| TTM-024 | 57 | MAADGYLPDWLEDNLSEGIREWWALKPGAPQPKANQQHQDNARGLVLPGYKYLGPG |
| 6 mer peptide | | NGLDKGEPVNAADAAALEHDKAYDQQLKAGDNPYLKYNHADAEFQERLKEDTSEGG |
| underlined, | | NLGRAVFQAKKRLLEPLGLVEEAAKTAPGKKRPVEQSPQEPDSSAGIGKSGAQPAK |
| starts at | | KRLNFGQTGDTESVPDPQPIGEPPAAPSGVGSLTMASGGGAPVADNNEGADGVGSS |
| position 456 | | SGNWHCDSQWLGDRVITTSTRTWALPTYNNHLYKQISNSTSGGSSNDNAYFGYSTP |
| (immediately | | WGYFDFNRFHCHFSPRDWORLINNNWGFRPKRLNFKLFNIQVKEVTDNNGVKTIAN |
| subsequent to | | NLTSTVQVFTDSDYQLPYVLGSAHEGCLPPFPADVFMIPQYGYLTLNDGSQAVGRS |
| position 455); | | SFYCLEYFPSQMLRTGNNFQFSYEFENVPFHSSYAHSQSLDRLMNPLIDQYLYYLS |
| modifications at | | KTSNGHDSPHSKAQNQQTLKFSVAGPSNMAVQGRNYIPGPSYRQQRVSTTVTQNNN |
| positions 451, | | SEFAWPGASSWALNGRNSLMNPGPAMASHKEGEDRFFPLSGSLIFGKQGTGRDNVD |
| 454, and 455 | | ADKVMITNEEEIKTTNPVATESYGQVATNHQSAQAQAQTGWVONQGILPGMVWODR |
| underlined; | | DVYLQGPIWAKIPHTDGNFHPSPLMGGFGMKHPPPQILIKNTPVPADPPTAFNKDK |
| 742 aa | | LNSFITQYSTGQVSVEIEWELQKENSKRWNPEIQYTSNYYKSNNVEFAVNTEGVYS |
| | | EPRPIGTRYLTRNL |
| TTM-025 | 58 | MAADGYLPDWLEDNLSEGIREWWALKPGAPQPKANQQHODNARGLVLPGYKYLGPG |
| 6 mer peptide | | NGLDKGEPVNAADAAALEHDKAYDQQLKAGDNPYLKYNHADAEFQERLKEDTSFGG |
| underlined, | | NLGRAVFQAKKRLLEPLGLVEEAAKTAPGKKRPVEQSPQEPDSSAGIGKSGAQPAK |
| starts at | | KRLNFGQTGDTESVPDPQPIGEPPAAPSGVGSLTMASGGGAPVADNNEGADGVGSS |
| position 456 | | SGNWHCDSQWLGDRVITTSTRTWALPTYNNHLYKQISNSTSGGSSNDNAYFGYSTP |
| (immediately | | WGYFDFNRFHCHFSPRDWORLINNNWGFRPKRLNFKLFNIQVKEVTDNNGVKTIAN |
| subsequent to | | NLTSTVQVFTDSDYQLPYVLGSAHEGCLPPFPADVFMIPQYGYLTLNDGSQAVGRS |
| position 455); | | SFYCLEYFPSQMLRTGNNFQFSYEFENVPFHSSYAHSQSLDRLMNPLIDQYLYYLS |
| modification at | | KTINGSGSPHSLPWNQQTLKFSVAGPSNMAVQGRNYIPGPSYRQQRVSTTVTQNNN |
| position 462 | | SEFAWPGASSWALNGRNSLMNPGPAMASHKEGEDRFFPLSGSLIFGKOGTGRDNVD |
| underlined; | | ADKVMITNEEEIKTTNPVATESYGQVATNHQSAQAQAQTGWVQNQGILPGMVWQDR |
| 742 aa | | DVYLQGPIWAKIPHTDGNFHPSPLMGGFGMKHPPPQILIKNTPVPADPPTAFNKDK |
| | | LNSFITQYSTGQVSVEIEWELQKENSKRWNPEIQYTSNYYKSNNVEFAVNTEGVYS |
| | | EPRPIGTRYLTRNL |
| TTM-026 | 59 | MAADGYLPDWLEDNLSEGIREWWALKPGAPQPKANQQHQDNARGLVLPGYKYLGPG |
| 6 mer peptide | | NGLDKGEPVNAADAAALEHDKAYDQQLKAGDNPYLKYNHADAEFQERLKEDTSFGG |
| underlined, | | NLGRAVFQAKKRLLEPLGLVEEAAKTAPGKKRPVEQSPQEPDSSAGIGKSGAQPAK |
| starts at | | KRLNFGQTGDTESVPDPQPIGEPPAAPSGVGSLTMASGGGAPVADNNEGADGVGSS |
| position 456 | | SGNWHCDSQWLGDRVITTSTRTWALPTYNNHLYKQISNSTSGGSSNDNAYFGYSTP |
| (immediately | | WGYFDFNRFHCHFSPRDWORLINNNWGFRPKRLNFKLFNIQVKEVTDNNGVKTIAN |
| subsequent to | | NLTSTVQVFTDSDYQLPYVLGSAHEGCLPPFPADVFMIPQYGYLTLNDGSQAVGRS |
| position 455); | | SFYCLEYFPSQMLRTGNNFQFSYEFENVPFHSSYAHSQSLDRLMNPLIDQYLYYLS |
| modification at | | KTINGHDSPHSKAQNHQTLKFSVAGPSNMAVOGRNYIPGPSYRQQRVSTTVTQNNN |
| positions 454, | | SEFAWPGASSWALNGRNSLMNPGPAMASHKEGEDRFFPLSGSLIFGKQGTGRDNVD |
| 455, and 464 | | ADKVMITNEEEIKTTNPVATESYGQVATNHQSAQAQAQTGWVONQGILPGMVWQDR |
| underlined; | | DVYLQGPIWAKIPHTDGNFHPSPLMGGFGMKHPPPQILIKNTPVPADPPTAFNKDK |
| 742 aa | | LNSFITQYSTGQVSVEIEWELQKENSKRWNPEIQYTSNYYKSNNVEFAVNTEGVYS |
| | | EPRPIGTRYLTRNL |

TABLE 5
Exemplary full length capsid nucleic acid sequences

| | SEQ | |
|---|---|---|
| Name and | ID | |
| Annotation | NO: | NT Sequence |
| TTM-001 | 983 | ATGGCTGCCGATGGTTATCTTCCAGattggcTCGAGGACAACCTTAGTGAAGGAAT |
| 9 mer peptide | | TCGCGAGTGGTGGGCTTTGAAACCTGGAGCCCCTCAACCCAAGGCAAATCAACAAC |
| underlined | | ATCAAGACAACGCTCGAGGTCTTGTGCTTCCGGGTTACAAATACCTTGGACCCGGC |
| | | AACGGACTCGACAAGGGGGAGCCGGTCAACGCAGCAGACGCGGCGGCCCTCGAGCA |
| | | CGACAAGGCCTACGACCAGCAGCTCAAGGCCGGAGACAACCCGTACCTCAAGTACA |
| | | ACCACGCCGACGCCGAGTTCCAGGAGCGGCTCAAAGAAGATACGTCTTTTGGGGGC |
| | | AACCTCGGGCGAGCAGTCTTCCAGGCCAAAAAGAGGCTTCTTGAACCTCTTGGTCT |
| | | GGTTGAGGAAGCGGCTAAGACGGCTCCTGGAAAGAAGAGGCCTGTAGAGCAGTCTC |
| | | CTCAGGAACCGGACTCCTCCGCGGGTATTGGCAAATCGGGTGCACAGCCCGCTAAA |
| | | AAGAGACTCAATTTCGGTCAGACTGGCGACACAGAGTCAGTCCCAGACCCTCAACC |
| | | AATCGGAGAACCTCCCGCAGCCCCCTCAGGTGTGGGATCTCTTACAATGGCTTCAG |
| | | GTGGTGGCGCACCAGTGGCAGACAATAACGAAGGTGCCGATGGAGTGGGTAGTTCC |
| | | TCGGGAAATTGGCATTGCGATTCCCAATGGCTGGGGGACAGAGTCATCACCACCAG |
| | | CACCCGAACCTGGGCCCTGCCCACCTACAACAATCACCTCTACAAGCAAATCTCCA |
| | | ACAGCACATCTGGAGGATCTTCAAATGACAACGCCTACTTCGGCTACAGCACCCCC |
| | | TGGGGGTATTTTGACTTCAACAGATTCCACTGCCACTTCTCACCACGTGACTGGCA |
| | | GCGACTCATCAACAACAACTGGGGATTCCGGCCTAAGCGACTCAACTTCAAGCTCT |
| | | TCAACATTCAGGTCAAAGAGGTTACGGACAACAATGGAGTCAAGACCATCGCCAAT |
| | | AACCTTACCAGCACGGTCCAGGTCTTCACGGACTCAGACTATCAGCTCCCGTACGT |
| | | GCTCGGGTCGGCTCACGAGGGCTGCCTCCCGCCGTTCCCAGCGGACGTTTTCATGA |
| | | TTCCTCAGTACGGGTATCTGACGCTTAATGATGGAAGCCAGGCCGTGGGTCGTTCG |
| | | TCCTTTTACTGCCTGGAATATTTCCCGTCGCAAATGCTAAGAACGGGTAACAACTT |
| | | CCAGTTCAGCTACGAGTTTGAGAACGTACCTTTCCATAGCAGCTACGCTCACAGCC |
| | | AAAGCCTGGACCGACTAATGAATCCACTCATCGACCAATACTTGTAtTActTgagt |
| | | AAaACaATTAACGGAAGCGGAAGCCCACACAGCAAAGCACAAAACCAACAGACCET |
| | | gAAgTTttcgGTaGCtGGtCCtAGCAACATGGCTGTCCAGGGAAGAAACTACATAC |
| | | CTGGACCCAGCTACCGACAACAACGTGTCTCAACCACTGTGACTCAAAACAACAAC |
| | | AGCGAATTTGCTTGGCCTGGAGCTTCTTCTTGGGCTCTCAATGGACGTAATAGCTT |
| | | GATGAATCCTGGACCTGCTATGGCCAGCCACAAAGAAGGAGAGGACCGTTTCTTTC |
| | | CTTTGTCTGGATCTTTAATTTTTGGCAAACAAGGAACTGGAAGAGACAACGTGGAT |
| | | GCGGACAAAGTCATGATAACCAACGAAGAAGAAATTAAAACTACTAACCCGGTAGC |
| | | AACGGAGTCCTATGGACAAGtggccacaaaccaccagagtGCCCAAGCACAGGCGC |
| | | AGaccggctgggttcaaaaccaAGGAATACTTCCGGGTATGGTTTGGCAGGACAGA |
| | | GATGTGTACCTGCAAGGACCCATTTGGGCCAAAATTCCTCACACGGACGGCAACTT |
| | | TCACCCTTCTCCGCTGATGGGAGGGTTTGGAATGAAGCACCCGCCTCCTCAGATCC |
| | | TCATCAAAAACACACCTGTACCTGCGGATCCTCCAACGGCCTTCAACAAGGACAAG |
| | | CTGAACTCTTTCATCACCCAGTATTCTACTGGCCAAGTCAGCGTGGAGATCGAGTG |
| | | GGAGCTGCAGAAGGAAAACAGCAAGCGCTGGAACCCGGAGATCCAGTACACTTCCA |
| | | ACTATTACAAGTCTAATAATGTTGAATTTGCTGTTAATACTGAAGGTGTATATAGT |
| | | GAACCCCGCCCCATTGGCACgcGgTAttTAACgaGgAActTaTAA |
| TTM-002 | 984 | ATGGCTGCCGATGGTTATCTTCCAGattggcTCGAGGACAACCTTAGTGAAGGAAT |
| 7 mer peptide | | TCGCGAGTGGTGGGCTTTGAAACCTGGAGCCCCTCAACCCAAGGCAAATCAACAAC |
| underlined | | ATCAAGACAACGCTCGAGGTCTTGTGCTTCCGGGTTACAAATACCTTGGACCCGGC |
| | | AACGGACTCGACAAGGGGGAGCCGGTCAACGCAGCAGACGCGGCGGCCCTCGAGCA |
| | | CGACAAGGCCTACGACCAGCAGCTCAAGGCCGGAGACAACCCGTACCTCAAGTACA |
| | | ACCACGCCGACGCCGAGTTCCAGGAGCGGCTCAAAGAAGATACGTCTTTTGGGGGC |
| | | AACCTCGGGCGAGCAGTCTTCCAGGCCAAAAAGAGGCTTCTTGAACCTCTTGGTCT |
| | | GGTTGAGGAAGCGGCTAAGACGGCTCCTGGAAAGAAGAGGCCTGTAGAGCAGTCTC |
| | | CTCAGGAACCGGACTCCTCCGCGGGTATTGGCAAATCGGGTGCACAGCCCGCTAAA |
| | | AAGAGACTCAATTTCGGTCAGACTGGCGACACAGAGTCAGTCCCAGACCCTCAACC |
| | | AATCGGAGAACCTCCCGCAGCCCCCTCAGGTGTGGGATCTCTTACAATGGCTTCAG |
| | | GTGGTGGCGCACCAGTGGCAGACAATAACGAAGGTGCCGATGGAGTGGGTAGTTCC |
| | | TCGGGAAATTGGCATTGCGATTCCCAATGGCTGGGGGACAGAGTCATCACCACCAG |
| | | CACCCGAACCTGGGCCCTGCCCACCTACAACAATCACCTCTACAAGCAAATCTCCA |
| | | ACAGCACATCTGGAGGATCTTCAAATGACAACGCCTACTTCGGCTACAGCACCCCC |
| | | TGGGGGTATTTTGACTTCAACAGATTCCACTGCCACTTCTCACCACGTGACTGGCA |
| | | GCGACTCATCAACAACAACTGGGGATTCCGGCCTAAGCGACTCAACTTCAAGCTCT |
| | | TCAACATTCAGGTCAAAGAGGTTACGGACAACAATGGAGTCAAGACCATCGCCAAT |
| | | AACCTTACCAGCACGGTCCAGGTCTTCACGGACTCAGACTATCAGCTCCCGTACGT |
| | | GCTCGGGTCGGCTCACGAGGGCTGCCTCCCGCCGTTCCCAGCGGACGTTTTCATGA |
| | | TTCCTCAGTACGGGTATCTGACGCTTAATGATGGAAGCCAGGCCGTGGGTCGTTCG |
| | | TCCTTTTACTGCCTGGAATATTTCCCGTCGCAAATGCTAAGAACGGGTAACAACTT |
| | | CCAGTTCAGCTACGAGTTTGAGAACGTACCTTTCCATAGCAGCTACGCTCACAGCC |
| | | AAAGCCTGGACCGACTAATGAATCCACTCATCGACCAATACTTGTAtTActTgagt |
| | | AAaACaATTAACGGACACGACAGCCCACACAAAAGCGGACAAAACCAACAGACCET |
| | | gAAgTTttcgGTaGCtGGtCCtAGCAACATGGCTGTCCAGGGAAGAAACTACATAC |
| | | CTGGACCCAGCTACCGACAACAACGTGTCTCAACCACTGTGACTCAAAACAACAAC |
| | | AGCGAATTTGCTTGGCCTGGAGCTTCTTCTTGGGCTCTCAATGGACGTAATAGCTT |
| | | GATGAATCCTGGACCTGCTATGGCCAGCCACAAAGAAGGAGAGGACCGTTTCTTTC |
| | | CTTTGTCTGGATCTTTAATTTTTGGCAAACAAGGAACTGGAAGAGACAACGTGGAT |
| | | GCGGACAAAGTCATGATAACCAACGAAGAAGAAATTAAAACTACTAACCCGGTAGC |
| | | AACGGAGTCCTATGGACAAGtggccacaaaccaccagagtGCCCAAGCACAGGCGC |
| | | AGaccggctgggttcaaaaccaAGGAATACTTCCGGGTATGGTTTGGCAGGACAGA |
| | | GATGTGTACCTGCAAGGACCCATTTGGGCCAAAATTCCTCACACGGACGGCAACTT |
| | | TCACCCTTCTCCGCTGATGGGAGGGTTTGGAATGAAGCACCCGCCTCCTCAGATCC |
| | | TCATCAAAAACACACCTGTACCTGCGGATCCTCCAACGGCCTTCAACAAGGACAAG |
| | | CTGAACTCTTTCATCACCCAGTATTCTACTGGCCAAGTCAGCGTGGAGATCGAGTG |
| | | GGAGCTGCAGAAGGAAAACAGCAAGCGCTGGAACCCGGAGATCCAGTACACTTCCA |
| | | ACTATTACAAGTCTAATAATGTTGAATTTGCTGTTAATACTGAAGGTGTATATAGT |
| | | GAACCCCGCCCCATTGGCACgcGgTAttTAACgaGgAActTaTAA |
| TTM-023 | 6553 | ATGGCTGCCGATGGTTATCTTCCAGattggcTCGAGGACAACCTTAGTGAAGGAAT |
| | | TCGCGAGTGGTGGGCTTTGAAACCTGGAGCCCCTCAACCCAAGGCAAATCAACAAC |
| | | ATCAAGACAACGCTCGAGGTCTTGTGCTTCCGGGTTACAAATACCTTGGACCCGGC |
| | | AACGGACTCGACAAGGGGGAGCCGGTCAACGCAGCAGACGCGGCGGCCCTCGAGCA |
| | | CGACAAGGCCTACGACCAGCAGCTCAAGGCCGGAGACAACCCGTACCTCAAGTACA |
| | | ACCACGCCGACGCCGAGTTCCAGGAGCGGCTCAAAGAAGATACGTCTTTTGGGGGC |
| | | AACCTCGGGCGAGCAGTCTTCCAGGCCAAAAAGAGGCTTCTTGAACCTCTTGGTCT |
| | | GGTTGAGGAAGCGGCTAAGACGGCTCCTGGAAAGAAGAGGCCTGTAGAGCAGTCTC |
| | | CTCAGGAACCGGACTCCTCCGCGGGTATTGGCAAATCGGGTGCACAGCCCGCTAAA |
| | | AAGAGACTCAATTTCGGTCAGACTGGCGACACAGAGTCAGTCCCAGACCCTCAACC |
| | | AATCGGAGAACCTCCCGCAGCCCCCTCAGGTGTGGGATCTCTTACAATGGCTTCAG |
| | | GTGGTGGCGCACCAGTGGCAGACAATAACGAAGGTGCCGATGGAGTGGGTAGTTCC |
| | | TCGGGAAATTGGCATTGCGATTCCCAATGGCTGGGGGACAGAGTCATCACCACCAG |
| | | CACCCGAACCTGGGCCCTGCCCACCTACAACAATCACCTCTACAAGCAAATCTCCA |
| | | ACAGCACATCTGGAGGATCTTCAAATGACAACGCCTACTTCGGCTACAGCACCCCC |
| | | TGGGGGTATTTTGACTTCAACAGATTCCACTGCCACTTCTCACCACGTGACTGGCA |
| | | GCGACTCATCAACAACAACTGGGGATTCCGGCCTAAGCGACTCAACTTCAAGCTCT |
| | | TCAACATTCAGGTCAAAGAGGTTACGGACAACAATGGAGTCAAGACCATCGCCAAT |
| | | AACCTTACCAGCACGGTCCAGGTCTTCACGGACTCAGACTATCAGCTCCCGTACGT |
| | | GCTCGGGTCGGCTCACGAGGGCTGCCTCCCGCCGTTCCCAGCGGACGTTTTCATGA |
| | | TTCCTCAGTACGGGTATCTGACGCTTAATGATGGAAGCCAGGCCGTGGGTCGTTCG |
| | | TCCTTTTACTGCCTGGAATATTTCCCGTCGCAAATGCTAAGAACGGGTAACAACTT |
| | | CCAGTTCAGCTACGAGTTTGAGAACGTACCTTTCCATAGCAGCTACGCTCACAGCC |
| | | AAAGCCTGGACCGACTAATGAATCCACTCATCGAtCAgTAtcTGTAtTActTgagt |
| | | AAGACGGAGCGTGTGTCTGGTTCTCCGCATTCTAAGGCGCAGAATCAGCAGACGtT |
| | | gAAgTTttcgGTaGCtGGtCCtAGcAAcATGGCTGTCCAGGGAAGAAACTACATAC |
| | | CTGGACCCAGCTACCGACAACAACGTGTCTCAACCACTGTGACTCAAAACAACAAC |
| | | AGCGAATTTGCTTGGCCTGGAGCTTCTTCTTGGGCTCTCAATGGACGTAATAGCTT |
| | | GATGAATCCTGGACCTGCTATGGCCAGCCACAAAGAAGGAGAGGACCGTTTCTTTC |
| | | CTTTGTCTGGATCTTTAATTTTTGGCAAACAAGGAACTGGAAGAGACAACGTGGAT |
| | | GCGGACAAAGTCATGATAACCAACGAAGAAGAAATTAAAACTACTAACCCGGTAGC |
| | | AACGGAGTCCTATGGACAAGtggccacaaaccaccagagtGCCCAAGCACAGGCGC |
| | | AGaccggctgggttcaaaaccaAGGAATACTTCCGGGTATGGTTTGGCAGGACAGA |
| | | GATGTGTACCTGCAAGGACCCATTTGGGCCAAAATTCCTCACACGGACGGCAACTT |
| | | TCACCCTTCTCCGCTGATGGGAGGGTTTGGAATGAAGCACCCGCCTCCTCAGATCC |
| | | TCATCAAAAACACACCTGTACCTGCGGATCCTCCAACGGCCTTCAACAAGGACAAG |
| | | CTGAACTCTTTCATCACCCAGTATTCTACTGGCCAAGTCAGCGTGGAGATCGAGTG |
| | | GGAGCTGCAGAAGGAAAACAGCAAGCGCTGGAACCCGGAGATCCAGTACACTTCCA |
| | | ACTATTACAAGTCTAATAATGTTGAATTTGCTGTTAATACTGAAGGTGTATATAGT |
| | | GAACCCCGCCCCATTGGCACgcGgTAttTAACgaGgAActTa |
| TTM-004 | 6554 | ATGGCTGCCGATGGTTATCTTCCAGattggcTCGAGGACAACCTTAGTGAAGGAAT |
| | | TCGCGAGTGGTGGGCTTTGAAACCTGGAGCCCCTCAACCCAAGGCAAATCAACAAC |
| | | ATCAAGACAACGCTCGAGGTCTTGTGCTTCCGGGTTACAAATACCTTGGACCCGGC |
| | | AACGGACTCGACAAGGGGGAGCCGGTCAACGCAGCAGACGCGGCGGCCCTCGAGCA |
| | | CGACAAGGCCTACGACCAGCAGCTCAAGGCCGGAGACAACCCGTACCTCAAGTACA |
| | | ACCACGCCGACGCCGAGTTCCAGGAGCGGCTCAAAGAAGATACGTCTTTTGGGGGC |
| | | AACCTCGGGCGAGCAGTCTTCCAGGCCAAAAAGAGGCTTCTTGAACCTCTTGGTCT |
| | | GGTTGAGGAAGCGGCTAAGACGGCTCCTGGAAAGAAGAGGCCTGTAGAGCAGTCTC |
| | | CTCAGGAACCGGACTCCTCCGCGGGTATTGGCAAATCGGGTGCACAGCCCGCTAAA |
| | | AAGAGACTCAATTTCGGTCAGACTGGCGACACAGAGTCAGTCCCAGACCCTCAACC |
| | | AATCGGAGAACCTCCCGCAGCCCCCTCAGGTGTGGGATCTCTTACAATGGCTTCAG |
| | | GTGGTGGCGCACCAGTGGCAGACAATAACGAAGGTGCCGATGGAGTGGGTAGTTCC |
| | | TCGGGAAATTGGCATTGCGATTCCCAATGGCTGGGGGACAGAGTCATCACCACCAG |
| | | CACCCGAACCTGGGCCCTGCCCACCTACAACAATCACCTCTACAAGCAAATCTCCA |
| | | ACAGCACATCTGGAGGATCTTCAAATGACAACGCCTACTTCGGCTACAGCACCCCC |
| | | TGGGGGTATTTTGACTTCAACAGATTCCACTGCCACTTCTCACCACGTGACTGGCA |
| | | GCGACTCATCAACAACAACTGGGGATTCCGGCCTAAGCGACTCAACTTCAAGCTCT |
| | | TCAACATTCAGGTCAAAGAGGTTACGGACAACAATGGAGTCAAGACCATCGCCAAT |
| | | AACCTTACCAGCACGGTCCAGGTCTTCACGGACTCAGACTATCAGCTCCCGTACGT |
| | | GCTCGGGTCGGCTCACGAGGGCTGCCTCCCGCCGTTCCCAGCGGACGTTTTCATGA |
| | | TTCCTCAGTACGGGTATCTGACGCTTAATGATGGAAGCCAGGCCGTGGGTCGTTCG |
| | | TCCTTTTACTGCCTGGAATATTTCCCGTCGCAAATGCTAAGAACGGGTAACAACTT |
| | | CCAGTTCAGCTACGAGTTTGAGAACGTACCTTTCCATAGCAGCTACGCTCACAGCC |
| | | AAAGCCTGGACCGACTAATGAATCCACTCATCGAtCAgTAtcTGTAt TActTgagt |
| | | AAGGCGGAGATTGGTCATGATTCTCCGCATAAGTCTGGTCAGAATCAGCAGACGET |
| | | gAAgTTttcgGTaGCtGGtCCtAGCAAcATGGCTGTCCAGGGAAGAAACTACATAC |
| | | CTGGACCCAGCTACCGACAACAACGTGTCTCAACCACTGTGACTCAAAACAACAAC |
| | | AGCGAATTTGCTTGGCCTGGAGCTTCTTCTTGGGCTCTCAATGGACGTAATAGCTT |
| | | GATGAATCCTGGACCTGCTATGGCCAGCCACAAAGAAGGAGAGGACCGTTTCTTTC |
| | | CTTTGTCTGGATCTTTAATTTTTGGCAAACAAGGAACTGGAAGAGACAACGTGGAT |
| | | GCGGACAAAGTCATGATAACCAACGAAGAAGAAATTAAAACTACTAACCCGGTAGC |
| | | AACGGAGTCCTATGGACAAGtggccacaaaccaccagagtGCCCAAGCACAGGCGC |
| | | AGaccggctgggttcaaaaccaAGGAATACTTCCGGGTATGGTTTGGCAGGACAGA |
| | | GATGTGTACCTGCAAGGACCCATTTGGGCCAAAATTCCTCACACGGACGGCAACTT |
| | | TCACCCTTCTCCGCTGATGGGAGGGTTTGGAATGAAGCACCCGCCTCCTCAGATCC |
| | | TCATCAAAAACACACCTGTACCTGCGGATCCTCCAACGGCCTTCAACAAGGACAAG |
| | | CTGAACTCTTTAATCACCCAGTATTCTACTGGCCAAGTCAGCGTGGAGATCGAGTG |
| | | GGAGCTGCAGAAGGAAAACAGCAAGCGCTGGAACCCGGAGATCCAGTACACTTCCA |
| | | ACTATTACAAGTCTAATAATGTTGAATTTGCTGTTAATACTGAAGGTGTATATAGT |
| | | GAACCCCGCCCCATTGGCACgcGgTAtTAACgaGgAActTa |
| TTM-005 | 6555 | ATGGCTGCCGATGGTTATCTTCCAGattggcTCGAGGACAACCTTAGTGAAGGAAT |
| | | TCGCGAGTGGTGGGCTTTGAAACCTGGAGCCCCTCAACCCAAGGCAAATCAACAAC |
| | | ATCAAGACAACGCTCGAGGTCTTGTGCTTCCGGGTTACAAATACCTTGGACCCGGC |
| | | AACGGACTCGACAAGGGGGAGCCGGTCAACGCAGCAGACGCGGCGGCCCTCGAGCA |
| | | CGACAAGGCCTACGACCAGCAGCTCAAGGCCGGAGACAACCCGTACCTCAAGTACA |
| | | ACCACGCCGACGCCGAGTTCCAGGAGCGGCTCAAAGAAGATACGTCTTTTGGGGGC |
| | | AACCTCGGGCGAGCAGTCTTCCAGGCCAAAAAGAGGCTTCTTGAACCTCTTGGTCT |
| | | GGTTGAGGAAGCGGCTAAGACGGCTCCTGGAAAGAAGAGGCCTGTAGAGCAGTCTC |
| | | CTCAGGAACCGGACTCCTCCGCGGGTATTGGCAAATCGGGTGCACAGCCCGCTAAA |
| | | AAGAGACTCAATTTCGGTCAGACTGGCGACACAGAGTCAGTCCCAGACCCTCAACC |
| | | AATCGGAGAACCTCCCGCAGCCCCCTCAGGTGTGGGATCTCTTACAATGGCTTCAG |
| | | GTGGTGGCGCACCAGTGGCAGACAATAACGAAGGTGCCGATGGAGTGGGTAGTTCC |
| | | TCGGGAAATTGGCATTGCGATTCCCAATGGCTGGGGGACAGAGTCATCACCACCAG |
| | | CACCCGAACCTGGGCCCTGCCCACCTACAACAATCACCTCTACAAGCAAATCTCCA |
| | | ACAGCACATCTGGAGGATCTTCAAATGACAACGCCTACTTCGGCTACAGCACCCCC |
| | | TGGGGGTATTTTGACTTCAACAGATTCCACTGCCACTTCTCACCACGTGACTGGCA |
| | | GCGACTCATCAACAACAACTGGGGATTCCGGCCTAAGCGACTCAACTTCAAGCTCT |
| | | TCAACATTCAGGTCAAAGAGGTTACGGACAACAATGGAGTCAAGACCATCGCCAAT |
| | | AACCTTACCAGCACGGTCCAGGTCTTCACGGACTCAGACTATCAGCTCCCGTACGT |
| | | GCTCGGGTCGGCTCACGAGGGCTGCCTCCCGCCGTTCCCAGCGGACGTTTTCATGA |
| | | TTCCTCAGTACGGGTATCTGACGCTTAATGATGGAAGCCAGGCCGTGGGTCGTTCG |
| | | TCCTTTTACTGCCTGGAATATTTCCCGTCGCAAATGCTAAGAACGGGTAACAACTT |
| | | CCAGTTCAGCTACGAGITTGAGAACGTACCTTTCCATAGCAGCTACGCTCACAGCC |
| | | AAAGCCTGGACCGACTAATGAATCCACTCATCGAtCAgTAtcTGTAtTActTgagt |
| | | AAGACGATTATTGGTTCTGGTTCTCCGCATTCTAAGGCGCAGAATCGTCATACGET |
| | | gAAgTTttcgGTaGCtGGtCCtAGCAACATGGCTGTCCAGGGAAGAAACTACATAC |
| | | CTGGACCCAGCTACCGACAACAACGTGTCTCAACCACTGTGACTCAAAACAACAAC |
| | | AGCGAATTTGCTTGGCCTGGAGCTTCTTCTTGGGCTCTCAATGGACGTAATAGCTT |
| | | GATGAATCCTGGACCTGCTATGGCCAGCCACAAAGAAGGAGAGGACCGTTTCTTTC |
| | | CTTTGTCTGGATCTTTAATTTTTGGCAAACAAGGAACTGGAAGAGACAACGTGGAT |
| | | GCGGACAAAGTCATGATAACCAACGAAGAAGAAATTAAAACTACTAACCCGGTAGC |
| | | AACGGAGTCCTATGGACAAGtggccacaaaccaccagagtGCCCAAGCACAGGCGC |
| | | AGaccggctgggttcaaaaccaAGGAATACTTCCGGGTATGGTTTGGCAGGACAGA |
| | | GATGTGTACCTGCAAGGACCCATTTGGGCCAAAATTCCTCACACGGACGGCAACTT |
| | | TCACCCTTCTCCGCTGATGGGAGGGTTTGGAATGAAGCACCCGCCTCCTCAGATCC |
| | | TCATCAAAAACACACCTGTACCTGCGGATCCTCCAACGGCCTTCAACAAGGACAAG |
| | | CTGAACTCTTTCATCACCCAGTATTCTACTGGCCAAGTCAGCGTGGAGATCGAGTG |
| | | GGAGCTGCAGAAGGAAAACAGCAAGCGCTGGAACCCGGAGATCCAGTACACTTCCA |
| | | ACTATTACAAGTCTAATAATGTTGAATTTGCTGTTAATACTGAAGGTGTATATAGT |
| | | GAACCCCGCCCCATTGGCACgcGgTAttTAACgaGgAActTa |
| TTM-006 | 6556 | ATGGCTGCCGATGGTTATCTTCCAGattggcTCGAGGACAACCTTAGTGAAGGAAT |
| | | TCGCGAGTGGTGGGCTTTGAAACCTGGAGCCCCTCAACCCAAGGCAAATCAACAAC |
| | | ATCAAGACAACGCTCGAGGTCTTGTGCTTCCGGGTTACAAATACCTTGGACCCGGC |
| | | AACGGACTCGACAAGGGGGAGCCGGTCAACGCAGCAGACGCGGCGGCCCTCGAGCA |
| | | CGACAAGGCCTACGACCAGCAGCTCAAGGCCGGAGACAACCCGTACCTCAAGTACA |
| | | ACCACGCCGACGCCGAGTTCCAGGAGCGGCTCAAAGAAGATACGTCTTTTGGGGGC |
| | | AACCTCGGGCGAGCAGTCTTCCAGGCCAAAAAGAGGCTTCTTGAACCTCTTGGTCT |
| | | GGTTGAGGAAGCGGCTAAGACGGCTCCTGGAAAGAAGAGGCCTGTAGAGCAGTCTC |
| | | CTCAGGAACCGGACTCCTCCGCGGGTATTGGCAAATCGGGTGCACAGCCCGCTAAA |
| | | AAGAGACTCAATTTCGGTCAGACTGGCGACACAGAGTCAGTCCCAGACCCTCAACC |
| | | AATCGGAGAACCTCCCGCAGCCCCCTCAGGTGTGGGATCTCTTACAATGGCTTCAG |
| | | GTGGTGGCGCACCAGTGGCAGACAATAACGAAGGTGCCGATGGAGTGGGTAGTTCC |
| | | TCGGGAAATTGGCATTGCGATTCCCAATGGCTGGGGGACAGAGTCATCACCACCAG |
| | | CACCCGAACCTGGGCCCTGCCCACCTACAACAATCACCTCTACAAGCAAATCTCCA |
| | | ACAGCACATCTGGAGGATCTTCAAATGACAACGCCTACTTCGGCTACAGCACCCCC |
| | | TGGGGGTATTTTGACTTCAACAGATTCCACTGCCACTTCTCACCACGTGACTGGCA |
| | | GCGACTCATCAACAACAACTGGGGATTCCGGCCTAAGCGACTCAACTTCAAGCTCT |
| | | TCAACATTCAGGTCAAAGAGGTTACGGACAACAATGGAGTCAAGACCATCGCCAAT |
| | | AACCTTACCAGCACGGTCCAGGTCTTCACGGACTCAGACTATCAGCTCCCGTACGT |
| | | GCTCGGGTCGGCTCACGAGGGCTGCCTCCCGCCGTTCCCAGCGGACGTTTTCATGA |
| | | TTCCTCAGTACGGGTATCTGACGCTTAATGATGGAAGCCAGGCCGTGGGTCGTTCG |
| | | TCCTTTTACTGCCTGGAATATTTCCCGTCGCAAATGCTAAGAACGGGTAACAACTT |
| | | CCAGTTCAGCTACGAGITTGAGAACGTACCTTTCCATAGCAGCTACGCTCACAGCC |
| | | AAAGCCTGGACCGACTAATGAATCCACTCATCGAtCAgTAtcTGTAtTActTgagt |
| | | AAGACGGAGAAGATGTCTGGTTCTCCGCATTCTAAGGCGCAGAATCAGCAGACGET |
| | | gAAgTTttcgGTaGCtGGtCCtAGCAACATGGCTGTCCAGGGAAGAAACTACATAC |
| | | CTGGACCCAGCTACCGACAACAACGTGTCTCAACCACTGTGACTCAAAACAACAAC |
| | | AGCGAATTTGCTTGGCCTGGAGCTTCTTCTTGGGCTCTCAATGGACGTAATAGCTT |
| | | GATGAATCCTGGACCTGCTATGGCCAGCCACAAAGAAGGAGAGGACCGTTTCTTTC |
| | | CTTTGTCTGGATCTTTAATTTTTGGCAAACAAGGAACTGGAAGAGACAACGTGGAT |
| | | GCGGACAAAGTCATGATAACCAACGAAGAAGAAATTAAAACTACTAACCCGGTAGC |
| | | AACGGAGTCCTATGGACAAGtggccacaaaccaccagagtGCCCAAGCACAGGCGC |
| | | AGaccggctgggttcaaaaccaAGGAATACTTCCGGGTATGGTTTGGCAGGACAGA |
| | | GATGTGTACCTGCAAGGACCCATTTGGGCCAAAATTCCTCACACGGACGGCAACTT |
| | | TCACCCTTCTCCGCTGATGGGAGGGTTTGGAATGAAGCACCCGCCTCCTCAGATCC |
| | | TCATCAAAAACACACCTGTACCTGCGGATCCTCCAACGGCCTTCAACAAGGACAAG |
| | | CTGAACTCTTTCATCACCCAGTATTCTACTGGCCAAGTCAGCGTGGAGATCGAGTG |
| | | GGAGCTGCAGAAGGAAAACAGCAAGCGCTGGAACCCGGAGATCCAGTACACTTCCA |
| | | ACTATTACAAGTCTAATAATGTTGAATTTGCTGTTAATACTGAAGGTGTATATAGT |
| | | GAACCCCGCCCCATTGGCACgcGgTAttTAACgaGgAActTa |
| TTM-007 | 16 | ATGGCTGCCGATGGTTATCTTCCAGattggcTCGAGGACAACCTTAGTGAAGGAAT |
| | | TCGCGAGTGGTGGGCTTTGAAACCTGGAGCCCCTCAACCCAAGGCAAATCAACAAC |
| | | ATCAAGACAACGCTCGAGGTCTTGTGCTTCCGGGTTACAAATACCTTGGACCCGGC |
| | | AACGGACTCGACAAGGGGGAGCCGGTCAACGCAGCAGACGCGGCGGCCCTCGAGCA |
| | | CGACAAGGCCTACGACCAGCAGCTCAAGGCCGGAGACAACCCGTACCTCAAGTACA |
| | | ACCACGCCGACGCCGAGTTCCAGGAGCGGCTCAAAGAAGATACGTCTTTTGGGGGC |
| | | AACCTCGGGCGAGCAGTCTTCCAGGCCAAAAAGAGGCTTCTTGAACCTCTTGGTCT |
| | | GGTTGAGGAAGCGGCTAAGACGGCTCCTGGAAAGAAGAGGCCTGTAGAGCAGTCTC |
| | | CTCAGGAACCGGACTCCTCCGCGGGTATTGGCAAATCGGGTGCACAGCCCGCTAAA |
| | | AAGAGACTCAATTTCGGTCAGACTGGCGACACAGAGTCAGTCCCAGACCCTCAACC |
| | | AATCGGAGAACCTCCCGCAGCCCCCTCAGGTGTGGGATCTCTTACAATGGCTTCAG |
| | | GTGGTGGCGCACCAGTGGCAGACAATAACGAAGGTGCCGATGGAGTGGGTAGTTCC |
| | | TCGGGAAATTGGCATTGCGATTCCCAATGGCTGGGGGACAGAGTCATCACCACCAG |
| | | CACCCGAACCTGGGCCCTGCCCACCTACAACAATCACCTCTACAAGCAAATCTCCA |
| | | ACAGCACATCTGGAGGATCTTCAAATGACAACGCCTACTTCGGCTACAGCACCCCC |
| | | TGGGGGTATTTTGACTTCAACAGATTCCACTGCCACTTCTCACCACGTGACTGGCA |
| | | GCGACTCATCAACAACAACTGGGGATTCCGGCCTAAGCGACTCAACTTCAAGCTCT |
| | | TCAACATTCAGGTCAAAGAGGTTACGGACAACAATGGAGTCAAGACCATCGCCAAT |
| | | AACCTTACCAGCACGGTCCAGGTCTTCACGGACTCAGACTATCAGCTCCCGTACGT |
| | | GCTCGGGTCGGCTCACGAGGGCTGCCTCCCGCCGTTCCCAGCGGACGTTTTCATGA |
| | | TTCCTCAGTACGGGTATCTGACGCTTAATGATGGAAGCCAGGCCGTGGGTCGTTCG |
| | | TCCTTTTACTGCCTGGAATATTTCCCGTCGCAAATGCTAAGAACGGGTAACAACTT |
| | | CCAGTTCAGCTACGAGITTGAGAACGTACCTTTCCATAGCAGCTACGCTCACAGCC |
| | | AAAGCCTGGACCGACTAATGAATCCACTCATCGAtCAgTAtcTGTAtTActTgagt |
| | | AAGGAGATTAATGGTCGTGGTTCTCCGCATTCTAAGGCGCAGAATCAGCAGACGET |
| | | gAAgTTttcgGTaGCtGGtCCtAGCAACATGGCTGTCCAGGGAAGAAACTACATAC |
| | | CTGGACCCAGCTACCGACAACAACGTGTCTCAACCACTGTGACTCAAAACAACAAC |
| | | AGCGAATTTGCTTGGCCTGGAGCTTCTTCTTGGGCTCTCAATGGACGTAATAGCTT |
| | | GATGAATCCTGGACCTGCTATGGCCAGCCACAAAGAAGGAGAGGACCGTTTCTTTC |
| | | CTTTGTCTGGATCTTTAATTTTTGGCAAACAAGGAACTGGAAGAGACAACGTGGAT |
| | | GCGGACAAAGTCATGATAACCAACGAAGAAGAAATTAAAACTACTAACCCGGTAGC |
| | | AACGGAGTCCTATGGACAAGtggccacaaaccaccagagtGCCCAAGCACAGGCGC |
| | | AGaccggctgggttcaaaaccaAGGAATACTTCCGGGTATGGTTTGGCAGGACAGA |
| | | GATGTGTACCTGCAAGGACCCATTTGGGCCAAAATTCCTCACACGGACGGCAACTT |
| | | TCACCCTTCTCCGCTGATGGGAGGGTTTGGAATGAAGCACCCGCCTCCTCAGATCC |
| | | TCATCAAAAACACACCTGTACCTGCGGATCCTCCAACGGCCTTCAACAAGGACAAG |
| | | CTGAACTCTTTCATCACCCAGTATTCTACTGGCCAAGTCAGCGTGGAGATCGAGTG |
| | | GGAGCTGCAGAAGGAAAACAGCAAGCGCTGGAACCCGGAGATCCAGTACACTTCCA |
| | | ACTATTACAAGTCTAATAATGTTGAATTTGCTGTTAATACTGAAGGTGTATATAGT |
| | | GAACCCCGCCCCATTGGCACgcGgTAttTAACgaGgAActTa |
| TTM-008 | 17 | ATGGCTGCCGATGGTTATCTTCCAGattggcTCGAGGACAACCTTAGTGAAGGAAT |
| | | TCGCGAGTGGTGGGCTTTGAAACCTGGAGCCCCTCAACCCAAGGCAAATCAACAAC |
| | | ATCAAGACAACGCTCGAGGTCTTGTGCTTCCGGGTTACAAATACCTTGGACCCGGC |
| | | AACGGACTCGACAAGGGGGAGCCGGTCAACGCAGCAGACGCGGCGGCCCTCGAGCA |
| | | CGACAAGGCCTACGACCAGCAGCTCAAGGCCGGAGACAACCCGTACCTCAAGTACA |
| | | ACCACGCCGACGCCGAGTTCCAGGAGCGGCTCAAAGAAGATACGTCTTTTGGGGGC |
| | | AACCTCGGGCGAGCAGTCTTCCAGGCCAAAAAGAGGCTTCTTGAACCTCTTGGTCT |
| | | GGTTGAGGAAGCGGCTAAGACGGCTCCTGGAAAGAAGAGGCCTGTAGAGCAGTCTC |
| | | CTCAGGAACCGGACTCCTCCGCGGGTATTGGCAAATCGGGTGCACAGCCCGCTAAA |
| | | AAGAGACTCAATTTCGGTCAGACTGGCGACACAGAGTCAGTCCCAGACCCTCAACC |
| | | AATCGGAGAACCTCCCGCAGCCCCCTCAGGTGTGGGATCTCTTACAATGGCTTCAG |
| | | GTGGTGGCGCACCAGTGGCAGACAATAACGAAGGTGCCGATGGAGTGGGTAGTTCC |
| | | CACCCGAACCTGGGCCCTGCCCACCTACAACAATCACCTCTACAAGCAAATCTCCA |
| | | TCGGGAAATTGGCATTGCGATTCCCAATGGCTGGGGGACAGAGTCATCACCACCAG |
| | | CACCCGAACCTGGGCCCTGCCCACCTACAACAATCACCTCTACAAGCAAATCTCCA |
| | | ACAGCACATCTGGAGGATCTTCAAATGACAACGCCTACTTCGGCTACAGCACCCCC |
| | | TGGGGGTATTTTGACTTCAACAGATTCCACTGCCACTTCTCACCACGTGACTGGCA |
| | | GCGACTCATCAACAACAACTGGGGATTCCGGCCTAAGCGACTCAACTTCAAGCTCT |
| | | TCAACATTCAGGTCAAAGAGGTTACGGACAACAATGGAGTCAAGACCATCGCCAAT |
| | | AACCTTACCAGCACGGTCCAGGTCTTCACGGACTCAGACTATCAGCTCCCGTACGT |
| | | GCTCGGGTCGGCTCACGAGGGCTGCCTCCCGCCGTTCCCAGCGGACGTTTTCATGA |
| | | TTCCTCAGTACGGGTATCTGACGCTTAATGATGGAAGCCAGGCCGTGGGTCGTTCG |
| | | TCCTTTTACTGCCTGGAATATTTCCCGTCGCAAATGCTAAGAACGGGTAACAACTT |
| | | CCAGTTCAGCTACGAGTTTGAGAACGTACCTTTCCATAGCAGCTACGCTCACAGCC |
| | | AAAGCCTGGACCGACTAATGAATCCACTCATCGAtCAgTAtcTGTAtTActTgagt |
| | | AAGACGTTTAATGGTTCTGGTTCTCCGCATTCTAAGGCGCCGAATCTGCAGACGET |
| | | gAAgTTttcgGTaGCtGGtCCtAGCAACATGGCTGTCCAGGGAAGAAACTACATAC |
| | | CTGGACCCAGCTACCGACAACAACGTGTCTCAACCACTGTGACTCAAAACAACAAC |
| | | AGCGAATTTGCTTGGCCTGGAGCTTCTTCTTGGGCTCTCAATGGACGTAATAGCTT |
| | | GATGAATCCTGGACCTGCTATGGCCAGCCACAAAGAAGGAGAGGACCGTTTCTTTC |
| | | CTTTGTCTGGATCTTTAATTTTTGGCAAACAAGGAACTGGAAGAGACAACGTGGAT |
| | | GCGGACAAAGTCATGATAACCAACGAAGAAGAAATTAAAACTACTAACCCGGTAGC |
| | | AACGGAGTCCTATGGACAAGtggccacaaaccaccagagtGCCCAAGCACAGGCGC |
| | | AGaccggctgggttcaaaaccaAGGAATACTTCCGGGTATGGTTTGGCAGGACAGA |
| | | GATGTGTACCTGCAAGGACCCATTTGGGCCAAAATTCCTCACACGGACGGCAACTT |
| | | TCACCCTTCTCCGCTGATGGGAGGGTTTGGAATGAAGCACCCGCCTCCTCAGATCC |
| | | TCATCAAAAACACACCTGTACCTGCGGATCCTCCAACGGCCTTCAACAAGGACAAG |
| | | CTGAACTCTTTCATCACCCAGTATTCTACTGGCCAAGTCAGCGTGGAGATCGAGTG |
| | | GGAGCTGCAGAAGGAAAACAGCAAGCGCTGGAACCCGGAGATCCAGTACACTTCCA |
| | | ACTATTACAAGTCTAATAATGTTGAATTTGCTGTTAATACTGAAGGTGTATATAGT |
| | | GAACCCCGCCCCATTGGCACgcGgTAttTAACgaGgAActTa |
| TTM-009 | 18 | ATGGCTGCCGATGGTTATCTTCCAGattggcTCGAGGACAACCTTAGTGAAGGAAT |
| | | TCGCGAGTGGTGGGCTTTGAAACCTGGAGCCCCTCAACCCAAGGCAAATCAACAAC |
| | | ATCAAGACAACGCTCGAGGTCTTGTGCTTCCGGGTTACAAATACCTTGGACCCGGC |
| | | AACGGACTCGACAAGGGGGAGCCGGTCAACGCAGCAGACGCGGCGGCCCTCGAGCA |
| | | CGACAAGGCCTACGACCAGCAGCTCAAGGCCGGAGACAACCCGTACCTCAAGTACA |
| | | ACCACGCCGACGCCGAGTTCCAGGAGCGGCTCAAAGAAGATACGTCTTTTGGGGGC |
| | | AACCTCGGGCGAGCAGTCTTCCAGGCCAAAAAGAGGCTTCTTGAACCTCTTGGTCT |
| | | GGTTGAGGAAGCGGCTAAGACGGCTCCTGGAAAGAAGAGGCCTGTAGAGCAGTCTC |
| | | CTCAGGAACCGGACTCCTCCGCGGGTATTGGCAAATCGGGTGCACAGCCCGCTAAA |
| | | AAGAGACTCAATTTCGGTCAGACTGGCGACACAGAGTCAGTCCCAGACCCTCAACC |
| | | AATCGGAGAACCTCCCGCAGCCCCCTCAGGTGTGGGATCTCTTACAATGGCTTCAG |
| | | GTGGTGGCGCACCAGTGGCAGACAATAACGAAGGTGCCGATGGAGTGGGTAGTTCC |
| | | TCGGGAAATTGGCATTGCGATTCCCAATGGCTGGGGGACAGAGTCATCACCACCAG |
| | | CACCCGAACCTGGGCCCTGCCCACCTACAACAATCACCTCTACAAGCAAATCTCCA |
| | | ACAGCACATCTGGAGGATCTTCAAATGACAACGCCTACTTCGGCTACAGCACCCCC |
| | | TGGGGGTATTTTGACTTCAACAGATTCCACTGCCACTTCTCACCACGTGACTGGCA |
| | | GCGACTCATCAACAACAACTGGGGATTCCGGCCTAAGCGACTCAACTTCAAGCTCT |
| | | TCAACATTCAGGTCAAAGAGGTTACGGACAACAATGGAGTCAAGACCATCGCCAAT |
| | | AACCTTACCAGCACGGTCCAGGTCTTCACGGACTCAGACTATCAGCTCCCGTACGT |
| | | GCTCGGGTCGGCTCACGAGGGCTGCCTCCCGCCGTTCCCAGCGGACGTTTTCATGA |
| | | TTCCTCAGTACGGGTATCTGACGCTTAATGATGGAAGCCAGGCCGTGGGTCGTTCG |
| | | TCCTTTTACTGCCTGGAATATTTCCCGTCGCAAATGCTAAGAACGGGTAACAACTT |
| | | CCAGTTCAGCTACGAGTTTGAGAACGTACCTTTCCATAGCAGCTACGCTCACAGCC |
| | | AAAGCCTGGACCGACTAATGAATCCACTCATCGAtCAgTAtcTGTAtTActTgagt |
| | | AAGACGGAGAAGACGTCTGGTTCTCCGCATTCTAAGGCGCAGAATCAGCAGACGET |
| | | gAAgTTttcgGTaGCtGGtCCtAGCAACATGGCTGTCCAGGGAAGAAACTACATAC |
| | | CTGGACCCAGCTACCGACAACAACGTGTCTCAACCACTGTGACTCAAAACAACAAC |
| | | AGCGAATTTGCTTGGCCTGGAGCTTCTTCTTGGGCTCTCAATGGACGTAATAGCTT |
| | | GATGAATCCTGGACCTGCTATGGCCAGCCACAAAGAAGGAGAGGACCGTTTCTTTC |
| | | CTTTGTCTGGATCTTTAATTTTTGGCAAACAAGGAACTGGAAGAGACAACGTGGAT |
| | | GCGGACAAAGTCATGATAACCAACGAAGAAGAAATTAAAACTACTAACCCGGTAGC |
| | | AACGGAGTCCTATGGACAAGtggccacaaaccaccagagtGCCCAAGCACAGGCGC |
| | | AGaccggctgggttcaaaaccaAGGAATACTTCCGGGTATGGTTTGGCAGGACAGA |
| | | GATGTGTACCTGCAAGGACCCATTTGGGCCAAAATTCCTCACACGGACGGCAACTT |
| | | TCACCCTTCTCCGCTGATGGGAGGGTTTGGAATGAAGCACCCGCCTCCTCAGATCC |
| | | TCATCAAAAACACACCTGTACCTGCGGATCCTCCAACGGCCTTCAACAAGGACAAG |
| | | CTGAACTCTTTCATCACCCAGTATTCTACTGGCCAAGTCAGCGTGGAGATCGAGTG |
| | | GGAGCTGCAGAAGGAAAACAGCAAGCGCTGGAACCCGGAGATCCAGTACACTTCCA |
| | | ACTATTACAAGTCTAATAATGTTGAATTTGCTGTTAATACTGAAGGTGTATATAGT |
| | | GAACCCCGCCCCATTGGCACgcGgTAttTAACgaGgAActTa |
| TTM-010 | 19 | ATGGCTGCCGATGGTTATCTTCCAGattggcTCGAGGACAACCTTAGTGAAGGAAT |
| | | TCGCGAGTGGTGGGCTTTGAAACCTGGAGCCCCTCAACCCAAGGCAAATCAACAAC |
| | | ATCAAGACAACGCTCGAGGTCTTGTGCTTCCGGGTTACAAATACCTTGGACCCGGC |
| | | AACGGACTCGACAAGGGGGAGCCGGTCAACGCAGCAGACGCGGCGGCCCTCGAGCA |
| | | CGACAAGGCCTACGACCAGCAGCTCAAGGCCGGAGACAACCCGTACCTCAAGTACA |
| | | ACCACGCCGACGCCGAGTTCCAGGAGCGGCTCAAAGAAGATACGTCTTTTGGGGGC |
| | | AACCTCGGGCGAGCAGTCTTCCAGGCCAAAAAGAGGCTTCTTGAACCTCTTGGTCT |
| | | GGTTGAGGAAGCGGCTAAGACGGCTCCTGGAAAGAAGAGGCCTGTAGAGCAGTCTC |
| | | CTCAGGAACCGGACTCCTCCGCGGGTATTGGCAAATCGGGTGCACAGCCCGCTAAA |
| | | AAGAGACTCAATTTCGGTCAGACTGGCGACACAGAGTCAGTCCCAGACCCTCAACC |
| | | AATCGGAGAACCTCCCGCAGCCCCCTCAGGTGTGGGATCTCTTACAATGGCTTCAG |
| | | GTGGTGGCGCACCAGTGGCAGACAATAACGAAGGTGCCGATGGAGTGGGTAGTTCC |
| | | TCGGGAAATTGGCATTGCGATTCCCAATGGCTGGGGGACAGAGTCATCACCACCAG |
| | | CACCCGAACCTGGGCCCTGCCCACCTACAACAATCACCTCTACAAGCAAATCTCCA |
| | | ACAGCACATCTGGAGGATCTTCAAATGACAACGCCTACTTCGGCTACAGCACCCCC |
| | | TGGGGGTATTTTGACTTCAACAGATTCCACTGCCACTTCTCACCACGTGACTGGCA |
| | | GCGACTCATCAACAACAACTGGGGATTCCGGCCTAAGCGACTCAACTTCAAGCTCT |
| | | TCAACATTCAGGTCAAAGAGGTTACGGACAACAATGGAGTCAAGACCATCGCCAAT |
| | | AACCTTACCAGCACGGTCCAGGTCTTCACGGACTCAGACTATCAGCTCCCGTACGT |
| | | GCTCGGGTCGGCTCACGAGGGCTGCCTCCCGCCGTTCCCAGCGGACGTTTTCATGA |
| | | TTCCTCAGTACGGGTATCTGACGCTTAATGATGGAAGCCAGGCCGTGGGTCGTTCG |
| | | TCCTTTTACTGCCTGGAATATTTCCCGTCGCAAATGCTAAGAACGGGTAACAACTT |
| | | CCAGTTCAGCTACGAGTTTGAGAACGTACCTTTCCATAGCAGCTACGCTCACAGCC |
| | | AAAGCCTGGACCGACTAATGAATCCACTCATCGAtCAgTAtcTGTAtTActTgagt |
| | | AAGACGATGAATGGTCATGATTCTCCGCATTCTAAGGCGCAGAATCAGCAGACGET |
| | | gAAgTTttcgGTaGCtGGtCCtAGCAACATGGCTGTCCAGGGAAGAAACTACATAC |
| | | CTGGACCCAGCTACCGACAACAACGTGTCTCAACCACTGTGACTCAAAACAACAAC |
| | | AGCGAATTTGCTTGGCCTGGAGCTTCTTCTTGGGCTCTCAATGGACGTAATAGCTT |
| | | GATGAATCCTGGACCTGCTATGGCCAGCCACAAAGAAGGAGAGGACCGTTTCTTTC |
| | | CTTTGTCTGGATCTTTAATTTTTGGCAAACAAGGAACTGGAAGAGACAACGTGGAT |
| | | GCGGACAAAGTCATGATAACCAACGAAGAAGAAATTAAAACTACTAACCCGGTAGC |
| | | AACGGAGTCCTATGGACAAGtggccacaaaccaccagagtGCCCAAGCACAGGCGC |
| | | AGaccggctgggttcaaaaccaAGGAATACTTCCGGGTATGGTTTGGCAGGACAGA |
| | | GATGTGTACCTGCAAGGACCCATTTGGGCCAAAATTCCTCACACGGACGGCAACTT |
| | | TCACCCTTCTCCGCTGATGGGAGGGTTTGGAATGAAGCACCCGCCTCCTCAGATCC |
| | | TCATCAAAAACACACCTGTACCTGCGGATCCTCCAACGGCCTTCAACAAGGACAAG |
| | | CTGAACTCTTTCATCACCCAGTATTCTACTGGCCAAGTCAGCGTGGAGATCGAGTG |
| | | GGAGCTGCAGAAGGAAAACAGCAAGCGCTGGAACCCGGAGATCCAGTACACTTCCA |
| | | ACTATTACAAGTCTAATAATGTTGAATTTGCTGTTAATACTGAAGGTGTATATAGT |
| | | GAACCCCGCCCCATTGGCACgcGgTAttTAACgaGgAActTa |
| TTM-011 | 20 | ATGGCTGCCGATGGTTATCTTCCAGattggcTCGAGGACAACCTTAGTGAAGGAAT |
| | | TCGCGAGTGGTGGGCTTTGAAACCTGGAGCCCCTCAACCCAAGGCAAATCAACAAC |
| | | ATCAAGACAACGCTCGAGGTCTTGTGCTTCCGGGTTACAAATACCTTGGACCCGGC |
| | | AACGGACTCGACAAGGGGGAGCCGGTCAACGCAGCAGACGCGGCGGCCCTCGAGCA |
| | | CGACAAGGCCTACGACCAGCAGCTCAAGGCCGGAGACAACCCGTACCTCAAGTACA |
| | | ACCACGCCGACGCCGAGTTCCAGGAGCGGCTCAAAGAAGATACGTCTTTTGGGGGC |
| | | AACCTCGGGCGAGCAGTCTTCCAGGCCAAAAAGAGGCTTCTTGAACCTCTTGGTCT |
| | | GGTTGAGGAAGCGGCTAAGACGGCTCCTGGAAAGAAGAGGCCTGTAGAGCAGTCTC |
| | | CTCAGGAACCGGACTCCTCCGCGGGTATTGGCAAATCGGGTGCACAGCCCGCTAAA |
| | | AAGAGACTCAATTTCGGTCAGACTGGCGACACAGAGTCAGTCCCAGACCCTCAACC |
| | | AATCGGAGAACCTCCCGCAGCCCCCTCAGGTGTGGGATCTCTTACAATGGCTTCAG |
| | | GTGGTGGCGCACCAGTGGCAGACAATAACGAAGGTGCCGATGGAGTGGGTAGTTCC |
| | | TCGGGAAATTGGCATTGCGATTCCCAATGGCTGGGGGACAGAGTCATCACCACCAG |
| | | CACCCGAACCTGGGCCCTGCCCACCTACAACAATCACCTCTACAAGCAAATCTCCA |
| | | ACAGCACATCTGGAGGATCTTCAAATGACAACGCCTACTTCGGCTACAGCACCCCC |
| | | TGGGGGTATTTTGACTTCAACAGATTCCACTGCCACTTCTCACCACGTGACTGGCA |
| | | GCGACTCATCAACAACAACTGGGGATTCCGGCCTAAGCGACTCAACTTCAAGCTCT |
| | | TCAACATTCAGGTCAAAGAGGTTACGGACAACAATGGAGTCAAGACCATCGCCAAT |
| | | AACCTTACCAGCACGGTCCAGGTCTTCACGGACTCAGACTATCAGCTCCCGTACGT |
| | | GCTCGGGTCGGCTCACGAGGGCTGCCTCCCGCCGTTCCCAGCGGACGTTTTCATGA |
| | | TTCCTCAGTACGGGTATCTGACGCTTAATGATGGAAGCCAGGCCGTGGGTCGTTCG |
| | | TCCTTTTACTGCCTGGAATATTTCCCGTCGCAAATGCTAAGAACGGGTAACAACTT |
| | | CCAGTTCAGCTACGAGITTGAGAACGTACCITTCCATAGCAGCTACGCTCACAGCC |
| | | AAAGCCTGGACCGACTAATGAATCCACTCATCGAtCAgTAtcTGTAtTActTgagt |
| | | AAGACGATTGATGGTCATGATTCTCCGCATTCTAAGGCGCAGAATCAGCAGACGET |
| | | gAAgTTttcgGTaGCtGGtCCtAGCAACATGGCTGTCCAGGGAAGAAACTACATAC |
| | | CTGGACCCAGCTACCGACAACAACGTGTCTCAACCACTGTGACTCAAAACAACAAC |
| | | AGCGAATTTGCTTGGCCTGGAGCTTCTTCTTGGGCTCTCAATGGACGTAATAGCTT |
| | | GATGAATCCTGGACCTGCTATGGCCAGCCACAAAGAAGGAGAGGACCGTTTCTTTC |
| | | CTTTGTCTGGATCTTTAATTTTTGGCAAACAAGGAACTGGAAGAGACAACGTGGAT |
| | | GCGGACAAAGTCATGATAACCAACGAAGAAGAAATTAAAACTACTAACCCGGTAGC |
| | | AACGGAGTCCTATGGACAAGtggccacaaaccaccagagtGCCCAAGCACAGGCGC |
| | | AGaccggctgggttcaaaaccaAGGAATACTTCCGGGTATGGTTTGGCAGGACAGA |
| | | GATGTGTACCTGCAAGGACCCATTTGGGCCAAAATTCCTCACACGGACGGCAACTT |
| | | TCACCCTTCTCCGCTGATGGGAGGGTTTGGAATGAAGCACCCGCCTCCTCAGATCC |
| | | TCATCAAAAACACACCTGTACCTGCGGATCCTCCAACGGCCTTCAACAAGGACAAG |
| | | CTGAACTCTTTCATCACCCAGTATTCTACTGGCCAAGTCAGCGTGGAGATCGAGTG |
| | | GGAGCTGCAGAAGGAAAACAGCAAGCGCTGGAACCCGGAGATCCAGTACACTTCCA |
| | | ACTATTACAAGTCTAATAATGTTGAATTTGCTGTTAATACTGAAGGTGTATATAGT |
| | | GAACCCCGCCCCATTGGCACgcGgTAttTAACgaGgAActTa |
| TTM-012 | 21 | ATGGCTGCCGATGGTTATCTTCCAGattggcTCGAGGACAACCTTAGTGAAGGAAT |
| | | TCGCGAGTGGTGGGCTTTGAAACCTGGAGCCCCTCAACCCAAGGCAAATCAACAAC |
| | | ATCAAGACAACGCTCGAGGTCTTGTGCTTCCGGGTTACAAATACCTTGGACCCGGC |
| | | AACGGACTCGACAAGGGGGAGCCGGTCAACGCAGCAGACGCGGCGGCCCTCGAGCA |
| | | CGACAAGGCCTACGACCAGCAGCTCAAGGCCGGAGACAACCCGTACCTCAAGTACA |
| | | ACCACGCCGACGCCGAGTTCCAGGAGCGGCTCAAAGAAGATACGTCTTTTGGGGGC |
| | | AACCTCGGGCGAGCAGTCTTCCAGGCCAAAAAGAGGCTTCTTGAACCTCTTGGTCT |
| | | GGTTGAGGAAGCGGCTAAGACGGCTCCTGGAAAGAAGAGGCCTGTAGAGCAGTCTC |
| | | CTCAGGAACCGGACTCCTCCGCGGGTATTGGCAAATCGGGTGCACAGCCCGCTAAA |
| | | AAGAGACTCAATTTCGGTCAGACTGGCGACACAGAGTCAGTCCCAGACCCTCAACC |
| | | AATCGGAGAACCTCCCGCAGCCCCCTCAGGTGTGGGATCTCTTACAATGGCTTCAG |
| | | GTGGTGGCGCACCAGTGGCAGACAATAACGAAGGTGCCGATGGAGTGGGTAGITCC |
| | | TCGGGAAATTGGCATTGCGATTCCCAATGGCTGGGGGACAGAGTCATCACCACCAG |
| | | CACCCGAACCTGGGCCCTGCCCACCTACAACAATCACCTCTACAAGCAAATCTCCA |
| | | ACAGCACATCTGGAGGATCTTCAAATGACAACGCCTACTTCGGCTACAGCACCCCC |
| | | TGGGGGTATTTTGACTTCAACAGATTCCACTGCCACTTCTCACCACGTGACTGGCA |
| | | GCGACTCATCAACAACAACTGGGGATTCCGGCCTAAGCGACTCAACTTCAAGCTCT |
| | | TCAACATTCAGGTCAAAGAGGTTACGGACAACAATGGAGTCAAGACCATCGCCAAT |
| | | AACCTTACCAGCACGGTCCAGGTCTTCACGGACTCAGACTATCAGCTCCCGTACGT |
| | | GCTCGGGTCGGCTCACGAGGGCTGCCTCCCGCCGTTCCCAGCGGACGTTTTCATGA |
| | | TTCCTCAGTACGGGTATCTGACGCTTAATGATGGAAGCCAGGCCGTGGGTCGTTCG |
| | | TCCTTTTACTGCCTGGAATATTTCCCGTCGCAAATGCTAAGAACGGGTAACAACTT |
| | | CCAGTTCAGCTACGAGTTTGAGAACGTACCTTTCCATAGCAGCTACGCTCACAGCC |
| | | AAAGCCTGGACCGACTAATGAATCCACTCATCGAtCAgTAtcTGTAtTActTgagt |
| | | AAGACGAATAATGGTCATGATTCTCCGCATTCTAAGGCGCAGAATCAGCAGACGtT |
| | | gAAgTTttcgGTaGCtGGtCCtAGCAACATGGCTGTCCAGGGAAGAAACTACATAC |
| | | CTGGACCCAGCTACCGACAACAACGTGTCTCAACCACTGTGACTCAAAACAACAAC |
| | | AGCGAATTTGCTTGGCCTGGAGCTTCTTCTTGGGCTCTCAATGGACGTAATAGCTT |
| | | GATGAATCCTGGACCTGCTATGGCCAGCCACAAAGAAGGAGAGGACCGTTTCTTTC |
| | | CTTTGTCTGGATCTTTAATTTTTGGCAAACAAGGAACTGGAAGAGACAACGTGGAT |
| | | GCGGACAAAGTCATGATAACCAACGAAGAAGAAATTAAAACTACTAACCCGGTAGC |
| | | AACGGAGTCCTATGGACAAGtggccacaaaccaccagagtGCCCAAGCACAGGCGC |
| | | AGaccggctgggttcaaaaccaAGGAATACTTCCGGGTATGGTTTGGCAGGACAGA |
| | | GATGTGTACCTGCAAGGACCCATTTGGGCCAAAATTCCTCACACGGACGGCAACTT |
| | | TCACCCTTCTCCGCTGATGGGAGGGTTTGGAATGAAGCACCCGCCTCCTCAGATCC |
| | | TCATCAAAAACACACCTGTACCTGCGGATCCTCCAACGGCCTTCAACAAGGACAAG |
| | | CTGAACTCTTTCATCACCCAGTATTCTACTGGCCAAGTCAGCGTGGAGATCGAGTG |
| | | GGAGCTGCAGAAGGAAAACAGCAAGCGCTGGAACCCGGAGATCCAGTACACTTCCA |
| | | ACTATTACAAGTCTAATAATGTTGAATTTGCTGTTAATACTGAAGGTGTATATAGT |
| | | GAACCCCGCCCCATTGGCACgcGgTAttTAACgaGgAActTa |
| TTM-013 | 22 | ATGGCTGCCGATGGTTATCTTCCAGattggcTCGAGGACAACCTTAGTGAAGGAAT |
| | | TCGCGAGTGGTGGGCTTTGAAACCTGGAGCCCCTCAACCCAAGGCAAATCAACAAC |
| | | ATCAAGACAACGCTCGAGGTCTTGTGCTTCCGGGTTACAAATACCTTGGACCCGGC |
| | | AACGGACTCGACAAGGGGGAGCCGGTCAACGCAGCAGACGCGGCGGCCCTCGAGCA |
| | | CGACAAGGCCTACGACCAGCAGCTCAAGGCCGGAGACAACCCGTACCTCAAGTACA |
| | | ACCACGCCGACGCCGAGTTCCAGGAGCGGCTCAAAGAAGATACGTCTTTTGGGGGC |
| | | AACCTCGGGCGAGCAGTCTTCCAGGCCAAAAAGAGGCTTCTTGAACCTCTTGGTCT |
| | | GGTTGAGGAAGCGGCTAAGACGGCTCCTGGAAAGAAGAGGCCTGTAGAGCAGTCTC |
| | | CTCAGGAACCGGACTCCTCCGCGGGTATTGGCAAATCGGGTGCACAGCCCGCTAAA |
| | | AAGAGACTCAATTTCGGTCAGACTGGCGACACAGAGTCAGTCCCAGACCCTCAACC |
| | | AATCGGAGAACCTCCCGCAGCCCCCTCAGGTGTGGGATCTCTTACAATGGCTTCAG |
| | | GTGGTGGCGCACCAGTGGCAGACAATAACGAAGGTGCCGATGGAGTGGGTAGTTCC |
| | | TCGGGAAATTGGCATTGCGATTCCCAATGGCTGGGGGACAGAGTCATCACCACCAG |
| | | CACCCGAACCTGGGCCCTGCCCACCTACAACAATCACCTCTACAAGCAAATCTCCA |
| | | ACAGCACATCTGGAGGATCTTCAAATGACAACGCCTACTTCGGCTACAGCACCCCC |
| | | TGGGGGTATTTTGACTTCAACAGATTCCACTGCCACTTCTCACCACGTGACTGGCA |
| | | GCGACTCATCAACAACAACTGGGGATTCCGGCCTAAGCGACTCAACTTCAAGCTCT |
| | | TCAACATTCAGGTCAAAGAGGTTACGGACAACAATGGAGTCAAGACCATCGCCAAT |
| | | AACCTTACCAGCACGGTCCAGGTCTTCACGGACTCAGACTATCAGCTCCCGTACGT |
| | | GCTCGGGTCGGCTCACGAGGGCTGCCTCCCGCCGTTCCCAGCGGACGTTTTCATGA |
| | | TTCCTCAGTACGGGTATCTGACGCTTAATGATGGAAGCCAGGCCGTGGGTCGTTCG |
| | | TCCTTTTACTGCCTGGAATATTTCCCGTCGCAAATGCTAAGAACGGGTAACAACTT |
| | | CCAGTTCAGCTACGAGTTTGAGAACGTACCTTTCCATAGCAGCTACGCTCACAGCC |
| | | AAAGCCTGGACCGACTAATGAATCCACTCATCGAtCAgTAtcTGTAtTActTgagt |
| | | AAGACGCAGCGTAAGTCTGGTTCTCCGCATTCTAAGGCGCAGAATCAGCAGACGET |
| | | gAAgTTttcgGTaGCtGGtCCtAGCAACATGGCTGTCCAGGGAAGAAACTACATAC |
| | | CTGGACCCAGCTACCGACAACAACGTGTCTCAACCACTGTGACTCAAAACAACAAC |
| | | AGCGAATTTGCTTGGCCTGGAGCTTCTTCTTGGGCTCTCAATGGACGTAATAGCTT |
| | | GATGAATCCTGGACCTGCTATGGCCAGCCACAAAGAAGGAGAGGACCGTTTCTTTC |
| | | CTTTGTCTGGATCTTTAATTTTTGGCAAACAAGGAACTGGAAGAGACAACGTGGAT |
| | | GCGGACAAAGTCATGATAACCAACGAAGAAGAAATTAAAACTACTAACCCGGTAGC |
| | | AACGGAGTCCTATGGACAAGtggccacaaaccaccagagtGCCCAAGCACAGGCGC |
| | | AGaccggctgggttcaaaaccaAGGAATACTTCCGGGTATGGTTTGGCAGGACAGA |
| | | GATGTGTACCTGCAAGGACCCATTTGGGCCAAAATTCCTCACACGGACGGCAACTT |
| | | TCACCCTTCTCCGCTGATGGGAGGGTTTGGAATGAAGCACCCGCCTCCTCAGATCC |
| | | TCATCAAAAACACACCTGTACCTGCGGATCCTCCAACGGCCTTCAACAAGGACAAG |
| | | CTGAACTCTTTCATCACCCAGTATTCTACTGGCCAAGTCAGCGTGGAGATCGAGTG |
| | | GGAGCTGCAGAAGGAAAACAGCAAGCGCTGGAACCCGGAGATCCAGTACACTTCCA |
| | | ACTATTACAAGTCTAATAATGTTGAATTTGCTGTTAATACTGAAGGTGTATATAGT |
| | | GAACCCCGCCCCATTGGCACgcGgTAttTAACgaGgAActTa |
| TTM-014 | 23 | ATGGCTGCCGATGGTTATCTTCCAGattggcTCGAGGACAACCTTAGTGAAGGAAT |
| | | TCGCGAGTGGTGGGCTTTGAAACCTGGAGCCCCTCAACCCAAGGCAAATCAACAAC |
| | | ATCAAGACAACGCTCGAGGTCTTGTGCTTCCGGGTTACAAATACCTTGGACCCGGC |
| | | AACGGACTCGACAAGGGGGAGCCGGTCAACGCAGCAGACGCGGCGGCCCTCGAGCA |
| | | CGACAAGGCCTACGACCAGCAGCTCAAGGCCGGAGACAACCCGTACCTCAAGTACA |
| | | ACCACGCCGACGCCGAGTTCCAGGAGCGGCTCAAAGAAGATACGTCTTTTGGGGGC |
| | | AACCTCGGGCGAGCAGTCTTCCAGGCCAAAAAGAGGCTTCTTGAACCTCTTGGTCT |
| | | GGTTGAGGAAGCGGCTAAGACGGCTCCTGGAAAGAAGAGGCCTGTAGAGCAGTCTC |
| | | CTCAGGAACCGGACTCCTCCGCGGGTATTGGCAAATCGGGTGCACAGCCCGCTAAA |
| | | AAGAGACTCAATTTCGGTCAGACTGGCGACACAGAGTCAGTCCCAGACCCTCAACC |
| | | AATCGGAGAACCTCCCGCAGCCCCCTCAGGTGTGGGATCTCTTACAATGGCTTCAG |
| | | GTGGTGGCGCACCAGTGGCAGACAATAACGAAGGTGCCGATGGAGTGGGTAGTTCC |
| | | TCGGGAAATTGGCATTGCGATTCCCAATGGCTGGGGGACAGAGTCATCACCACCAG |
| | | CACCCGAACCTGGGCCCTGCCCACCTACAACAATCACCTCTACAAGCAAATCTCCA |
| | | ACAGCACATCTGGAGGATCTTCAAATGACAACGCCTACTTCGGCTACAGCACCCCC |
| | | TGGGGGTATTTTGACTTCAACAGATTCCACTGCCACTTCTCACCACGTGACTGGCA |
| | | GCGACTCATCAACAACAACTGGGGATTCCGGCCTAAGCGACTCAACTTCAAGCTCT |
| | | TCAACATTCAGGTCAAAGAGGTTACGGACAACAATGGAGTCAAGACCATCGCCAAT |
| | | AACCTTACCAGCACGGTCCAGGTCTTCACGGACTCAGACTATCAGCTCCCGTACGT |
| | | GCTCGGGTCGGCTCACGAGGGCTGCCTCCCGCCGTTCCCAGCGGACGTTTTCATGA |
| | | TTCCTCAGTACGGGTATCTGACGCTTAATGATGGAAGCCAGGCCGTGGGTCGTTCG |
| | | TCCTTTTACTGCCTGGAATATTTCCCGTCGCAAATGCTAAGAACGGGTAACAACTT |
| | | CCAGTTCAGCTACGAGITTGAGAACGTACCTTTCCATAGCAGCTACGCTCACAGCC |
| | | AAAGCCTGGACCGACTAATGAATCCACTCATCGAtCAgTAtcTGTAtTActTgagt |
| | | AAGACGATTAATGGTTCTGGTTCTCCGCATTCTAAGGCGCAGGCGCGTAAGACGET |
| | | gAAgTTttcgGTaGCtGGtCCtAGCAACATGGCTGTCCAGGGAAGAAACTACATAC |
| | | CTGGACCCAGCTACCGACAACAACGTGTCTCAACCACTGTGACTCAAAACAACAAC |
| | | AGCGAATTTGCTTGGCCTGGAGCTTCTTCTTGGGCTCTCAATGGACGTAATAGCTT |
| | | GATGAATCCTGGACCTGCTATGGCCAGCCACAAAGAAGGAGAGGACCGTTTCTTTC |
| | | CTTTGTCTGGATCTTTAATTTTTGGCAAACAAGGAACTGGAAGAGACAACGTGGAT |
| | | GCGGACAAAGTCATGATAACCAACGAAGAAGAAATTAAAACTACTAACCCGGTAGC |
| | | AACGGAGTCCTATGGACAAGtggccacaaaccaccagagtGCCCAAGCACAGGCGC |
| | | AGaccggctgggttcaaaaccaAGGAATACTTCCGGGTATGGTTTGGCAGGACAGA |
| | | GATGTGTACCTGCAAGGACCCATTTGGGCCAAAATTCCTCACACGGACGGCAACTT |
| | | TCACCCTTCTCCGCTGATGGGAGGGTTTGGAATGAAGCACCCGCCTCCTCAGATCC |
| | | TCATCAAAAACACACCTGTACCTGCGGATCCTCCAACGGCCTTCAACAAGGACAAG |
| | | CTGAACTCTTTCATCACCCAGTATTCTACTGGCCAAGTCAGCGTGGAGATCGAGTG |
| | | GGAGCTGCAGAAGGAAAACAGCAAGCGCTGGAACCCGGAGATCCAGTACACTTCCA |
| | | ACTATTACAAGTCTAATAATGTTGAATTTGCTGTTAATACTGAAGGTGTATATAGT |
| | | GAACCCCGCCCCATTGGCACgcGgTAttTAACgaGgAActTa |
| TTM-015 | 24 | ATGGCTGCCGATGGTTATCTTCCAGattggcTCGAGGACAACCTTAGTGAAGGAAT |
| | | TCGCGAGTGGTGGGCTTTGAAACCTGGAGCCCCTCAACCCAAGGCAAATCAACAAC |
| | | ATCAAGACAACGCTCGAGGTCTTGTGCTTCCGGGTTACAAATACCTTGGACCCGGC |
| | | AACGGACTCGACAAGGGGGAGCCGGTCAACGCAGCAGACGCGGCGGCCCTCGAGCA |
| | | CGACAAGGCCTACGACCAGCAGCTCAAGGCCGGAGACAACCCGTACCTCAAGTACA |
| | | ACCACGCCGACGCCGAGTTCCAGGAGCGGCTCAAAGAAGATACGTCTTTTGGGGGC |
| | | AACCTCGGGCGAGCAGTCTTCCAGGCCAAAAAGAGGCTTCTTGAACCTCTTGGTCT |
| | | GGTTGAGGAAGCGGCTAAGACGGCTCCTGGAAAGAAGAGGCCTGTAGAGCAGTCTC |
| | | CTCAGGAACCGGACTCCTCCGCGGGTATTGGCAAATCGGGTGCACAGCCCGCTAAA |
| | | AAGAGACTCAATTTCGGTCAGACTGGCGACACAGAGTCAGTCCCAGACCCTCAACC |
| | | AATCGGAGAACCTCCCGCAGCCCCCTCAGGTGTGGGATCTCTTACAATGGCTTCAG |
| | | GTGGTGGCGCACCAGTGGCAGACAATAACGAAGGTGCCGATGGAGTGGGTAGTTCC |
| | | TCGGGAAATTGGCATTGCGATTCCCAATGGCTGGGGGACAGAGTCATCACCACCAG |
| | | CACCCGAACCTGGGCCCTGCCCACCTACAACAATCACCTCTACAAGCAAATCTCCA |
| | | ACAGCACATCTGGAGGATCTTCAAATGACAACGCCTACTTCGGCTACAGCACCCCC |
| | | TGGGGGTATTTTGACTTCAACAGATTCCACTGCCACTTCTCACCACGTGACTGGCA |
| | | GCGACTCATCAACAACAACTGGGGATTCCGGCCTAAGCGACTCAACTTCAAGCTCT |
| | | TCAACATTCAGGTCAAAGAGGTTACGGACAACAATGGAGTCAAGACCATCGCCAAT |
| | | AACCTTACCAGCACGGTCCAGGTCTTCACGGACTCAGACTATCAGCTCCCGTACGT |
| | | GCTCGGGTCGGCTCACGAGGGCTGCCTCCCGCCGTTCCCAGCGGACGTTTTCATGA |
| | | TTCCTCAGTACGGGTATCTGACGCTTAATGATGGAAGCCAGGCCGTGGGTCGTTCG |
| | | TCCTTTTACTGCCTGGAATATTTCCCGTCGCAAATGCTAAGAACGGGTAACAACTT |
| | | CCAGTTCAGCTACGAGTTTGAGAACGTACCTTTCCATAGCAGCTACGCTCACAGCC |
| | | AAAGCCTGGACCGACTAATGAATCCACTCATCGAtCAgTAtcTGTAtTActTgagt |
| | | AAGTATATTGTGGGTTCTGGTTCTCCGCATTCTAAGGCGCAGAATCAGCAGACGET |
| | | gAAgTTttcgGTaGCtGGtCCtAGCAACATGGCTGTCCAGGGAAGAAACTACATAC |
| | | CTGGACCCAGCTACCGACAACAACGTGTCTCAACCACTGTGACTCAAAACAACAAC |
| | | AGCGAATTTGCTTGGCCTGGAGCTTCTTCTTGGGCTCTCAATGGACGTAATAGCTT |
| | | GATGAATCCTGGACCTGCTATGGCCAGCCACAAAGAAGGAGAGGACCGTTTCTTTC |
| | | CTTTGTCTGGATCTTTAATTTTTGGCAAACAAGGAACTGGAAGAGACAACGTGGAT |
| | | GCGGACAAAGTCATGATAACCAACGAAGAAGAAATTAAAACTACTAACCCGGTAGC |
| | | AACGGAGTCCTATGGACAAGtggccacaaaccaccagagtGCCCAAGCACAGGCGC |
| | | AGaccggctgggttcaaaaccaAGGAATACTTCCGGGTATGGTTTGGCAGGACAGA |
| | | GATGTGTACCTGCAAGGACCCATTTGGGCCAAAATTCCTCACACGGACGGCAACTT |
| | | TCACCCTTCTCCGCTGATGGGAGGGTTTGGAATGAAGCACCCGCCTCCTCAGATCC |
| | | TCATCAAAAACACACCTGTACCTGCGGATCCTCCAACGGCCTTCAACAAGGACAAG |
| | | CTGAACTCTTTCATCACCCAGTATTCTACTGGCCAAGTCAGCGTGGAGATCGAGTG |
| | | GGAGCTGCAGAAGGAAAACAGCAAGCGCTGGAACCCGGAGATCCAGTACACTTCCA |
| | | ACTATTACAAGTCTAATAATGTTGAATTTGCTGTTAATACTGAAGGTGTATATAGT |
| | | GAACCCCGCCCCATTGGCACgcGgTAttTAACgaGgAActTa |
| TTM-016 | 25 | ATGGCTGCCGATGGTTATCTTCCAGattggcTCGAGGACAACCTTAGTGAAGGAAT |
| | | TCGCGAGTGGTGGGCTTTGAAACCTGGAGCCCCTCAACCCAAGGCAAATCAACAAC |
| | | ATCAAGACAACGCTCGAGGTCTTGTGCTTCCGGGTTACAAATACCTTGGACCCGGC |
| | | AACGGACTCGACAAGGGGGAGCCGGTCAACGCAGCAGACGCGGCGGCCCTCGAGCA |
| | | CGACAAGGCCTACGACCAGCAGCTCAAGGCCGGAGACAACCCGTACCTCAAGTACA |
| | | ACCACGCCGACGCCGAGTTCCAGGAGCGGCTCAAAGAAGATACGTCTTTTGGGGGC |
| | | AACCTCGGGCGAGCAGTCTTCCAGGCCAAAAAGAGGCTTCTTGAACCTCTTGGTCT |
| | | GGTTGAGGAAGCGGCTAAGACGGCTCCTGGAAAGAAGAGGCCTGTAGAGCAGTCTC |
| | | CTCAGGAACCGGACTCCTCCGCGGGTATTGGCAAATCGGGTGCACAGCCCGCTAAA |
| | | AAGAGACTCAATTTCGGTCAGACTGGCGACACAGAGTCAGTCCCAGACCCTCAACC |
| | | AATCGGAGAACCTCCCGCAGCCCCCTCAGGTGTGGGATCTCTTACAATGGCTTCAG |
| | | GTGGTGGCGCACCAGTGGCAGACAATAACGAAGGTGCCGATGGAGTGGGTAGTTCC |
| | | TCGGGAAATTGGCATTGCGATTCCCAATGGCTGGGGGACAGAGTCATCACCACCAG |
| | | CACCCGAACCTGGGCCCTGCCCACCTACAACAATCACCTCTACAAGCAAATCTCCA |
| | | ACAGCACATCTGGAGGATCTTCAAATGACAACGCCTACTTCGGCTACAGCACCCCC |
| | | TGGGGGTATTTTGACTTCAACAGATTCCACTGCCACTTCTCACCACGTGACTGGCA |
| | | GCGACTCATCAACAACAACTGGGGATTCCGGCCTAAGCGACTCAACTTCAAGCTCT |
| | | TCAACATTCAGGTCAAAGAGGTTACGGACAACAATGGAGTCAAGACCATCGCCAAT |
| | | AACCTTACCAGCACGGTCCAGGTCTTCACGGACTCAGACTATCAGCTCCCGTACGT |
| | | GCTCGGGTCGGCTCACGAGGGCTGCCTCCCGCCGTTCCCAGCGGACGTTTTCATGA |
| | | TTCCTCAGTACGGGTATCTGACGCTTAATGATGGAAGCCAGGCCGTGGGTCGTTCG |
| | | TCCTTTTACTGCCTGGAATATTTCCCGTCGCAAATGCTAAGAACGGGTAACAACTT |
| | | CCAGTTCAGCTACGAGTTTGAGAACGTACCTTTCCATAGCAGCTACGCTCACAGCC |
| | | AAAGCCTGGACCGACTAATGAATCCACTCATCGAtCAgTAtcTGTAtTActTgagt |
| | | AAGACGATTTCTAAGCGTGGTTCTCCGCATTCTAAGGCGCAGAATCAGCAGACGET |
| | | gAAgTTttcgGTaGCtGGtCCtAGCAACATGGCTGTCCAGGGAAGAAACTACATAC |
| | | CTGGACCCAGCTACCGACAACAACGTGTCTCAACCACTGTGACTCAAAACAACAAC |
| | | AGCGAATTTGCTTGGCCTGGAGCTTCTTCTTGGGCTCTCAATGGACGTAATAGCTT |
| | | GATGAATCCTGGACCTGCTATGGCCAGCCACAAAGAAGGAGAGGACCGTTTCTTTC |
| | | CTTTGTCTGGATCTTTAATTTTTGGCAAACAAGGAACTGGAAGAGACAACGTGGAT |
| | | GCGGACAAAGTCATGATAACCAACGAAGAAGAAATTAAAACTACTAACCCGGTAGC |
| | | AACGGAGTCCTATGGACAAGtggccacaaaccaccagagtGCCCAAGCACAGGCGC |
| | | AGaccggctgggttcaaaaccaAGGAATACTTCCGGGTATGGTTTGGCAGGACAGA |
| | | GATGTGTACCTGCAAGGACCCATTTGGGCCAAAATTCCTCACACGGACGGCAACTT |
| | | TCACCCTTCTCCGCTGATGGGAGGGTTTGGAATGAAGCACCCGCCTCCTCAGATCC |
| | | TCATCAAAAACACACCTGTACCTGCGGATCCTCCAACGGCCTTCAACAAGGACAAG |
| | | CTGAACTCTTTCATCACCCAGTATTCTACTGGCCAAGTCAGCGTGGAGATCGAGTG |
| | | GGAGCTGCAGAAGGAAAACAGCAAGCGCTGGAACCCGGAGATCCAGTACACTTCCA |
| | | ACTATTACAAGTCTAATAATGTTGAATTTGCTGTTAATACTGAAGGTGTATATAGT |
| | | GAACCCCGCCCCATTGGCACgcGgTAttTAACgaGgAActTa |
| TTM-017 | 26 | ATGGCTGCCGATGGTTATCTTCCAGattggcTCGAGGACAACCTTAGTGAAGGAAT |
| | | TCGCGAGTGGTGGGCTTTGAAACCTGGAGCCCCTCAACCCAAGGCAAATCAACAAC |
| | | ATCAAGACAACGCTCGAGGTCTTGTGCTTCCGGGTTACAAATACCTTGGACCCGGC |
| | | AACGGACTCGACAAGGGGGAGCCGGTCAACGCAGCAGACGCGGCGGCCCTCGAGCA |
| | | CGACAAGGCCTACGACCAGCAGCTCAAGGCCGGAGACAACCCGTACCTCAAGTACA |
| | | ACCACGCCGACGCCGAGTTCCAGGAGCGGCTCAAAGAAGATACGTCTTTTGGGGGC |
| | | AACCTCGGGCGAGCAGTCTTCCAGGCCAAAAAGAGGCTTCTTGAACCTCTTGGTCT |
| | | GGTTGAGGAAGCGGCTAAGACGGCTCCTGGAAAGAAGAGGCCTGTAGAGCAGTCTC |
| | | CTCAGGAACCGGACTCCTCCGCGGGTATTGGCAAATCGGGTGCACAGCCCGCTAAA |
| | | AAGAGACTCAATTTCGGTCAGACTGGCGACACAGAGTCAGTCCCAGACCCTCAACC |
| | | AATCGGAGAACCTCCCGCAGCCCCCTCAGGTGTGGGATCTCTTACAATGGCTTCAG |
| | | GTGGTGGCGCACCAGTGGCAGACAATAACGAAGGTGCCGATGGAGTGGGTAGTTCC |
| | | TCGGGAAATTGGCATTGCGATTCCCAATGGCTGGGGGACAGAGTCATCACCACCAG |
| | | CACCCGAACCTGGGCCCTGCCCACCTACAACAATCACCTCTACAAGCAAATCTCCA |
| | | ACAGCACATCTGGAGGATCTTCAAATGACAACGCCTACTTCGGCTACAGCACCCCC |
| | | TGGGGGTATTTTGACTTCAACAGATTCCACTGCCACTTCTCACCACGTGACTGGCA |
| | | GCGACTCATCAACAACAACTGGGGATTCCGGCCTAAGCGACTCAACTTCAAGCTCT |
| | | TCAACATTCAGGTCAAAGAGGTTACGGACAACAATGGAGTCAAGACCATCGCCAAT |
| | | AACCTTACCAGCACGGTCCAGGTCTTCACGGACTCAGACTATCAGCTCCCGTACGT |
| | | GCTCGGGTCGGCTCACGAGGGCTGCCTCCCGCCGTTCCCAGCGGACGTTTTCATGA |
| | | TTCCTCAGTACGGGTATCTGACGCTTAATGATGGAAGCCAGGCCGTGGGTCGTTCG |
| | | TCCTTTTACTGCCTGGAATATTTCCCGTCGCAAATGCTAAGAACGGGTAACAACTT |
| | | CCAGTTCAGCTACGAGTTTGAGAACGTACCTTTCCATAGCAGCTACGCTCACAGCC |
| | | AAAGCCTGGACCGACTAATGAATCCACTCATCGAtCAgTAtcTGTAtTActTgagt |
| | | AAGGGTCTGGGTGGTTCTGGTTCTCCGCATTCTAAGGCGCAGAATCAGCAGACGtT |
| | | gAAgTTttcgGTaGCtGGtCCtAGCAACATGGCTGTCCAGGGAAGAAACTACATAC |
| | | CTGGACCCAGCTACCGACAACAACGTGTCTCAACCACTGTGACTCAAAACAACAAC |
| | | AGCGAATTTGCTTGGCCTGGAGCTTCTTCTTGGGCTCTCAATGGACGTAATAGCTT |
| | | GATGAATCCTGGACCTGCTATGGCCAGCCACAAAGAAGGAGAGGACCGTTTCTTTC |
| | | GCGGACAAAGTCATGATAACCAACGAAGAAGAAATTAAAACTACTAACCCGGTAGC |
| | | CTTTGTCTGGATCTTTAATTTTTGGCAAACAAGGAACTGGAAGAGACAACGTGGAT |
| | | GCGGACAAAGTCATGATAACCAACGAAGAAGAAATTAAAACTACTAACCCGGTAGC |
| | | AACGGAGTCCTATGGACAAGtggccacaaaccaccagagtGCCCAAGCACAGGCGC |
| | | AGaccggctgggttcaaaaccaAGGAATACTTCCGGGTATGGTTTGGCAGGACAGA |
| | | GATGTGTACCTGCAAGGACCCATTTGGGCCAAAATTCCTCACACGGACGGCAACTT |
| | | TCACCCTTCTCCGCTGATGGGAGGGTTTGGAATGAAGCACCCGCCTCCTCAGATCC |
| | | TCATCAAAAACACACCTGTACCTGCGGATCCTCCAACGGCCTTCAACAAGGACAAG |
| | | CTGAACTCTTTCATCACCCAGTATTCTACTGGCCAAGTCAGCGTGGAGATCGAGTG |
| | | GGAGCTGCAGAAGGAAAACAGCAAGCGCTGGAACCCGGAGATCCAGTACACTTCCA |
| | | ACTATTACAAGTCTAATAATGTTGAATTTGCTGTTAATACTGAAGGTGTATATAGT |
| | | GAACCCCGCCCCATTGGCACgcGgTAttTAACgaGgAActTa |
| TTM-018 | 27 | ATGGCTGCCGATGGTTATCTTCCAGattggcTCGAGGACAACCTTAGTGAAGGAAT |
| | | TCGCGAGTGGTGGGCTTTGAAACCTGGAGCCCCTCAACCCAAGGCAAATCAACAAC |
| | | ATCAAGACAACGCTCGAGGTCTTGTGCTTCCGGGTTACAAATACCTTGGACCCGGC |
| | | AACGGACTCGACAAGGGGGAGCCGGTCAACGCAGCAGACGCGGCGGCCCTCGAGCA |
| | | CGACAAGGCCTACGACCAGCAGCTCAAGGCCGGAGACAACCCGTACCTCAAGTACA |
| | | ACCACGCCGACGCCGAGTTCCAGGAGCGGCTCAAAGAAGATACGTCTTTTGGGGGC |
| | | AACCTCGGGCGAGCAGTCTTCCAGGCCAAAAAGAGGCTTCTTGAACCTCTTGGTCT |
| | | GGTTGAGGAAGCGGCTAAGACGGCTCCTGGAAAGAAGAGGCCTGTAGAGCAGTCTC |
| | | CTCAGGAACCGGACTCCTCCGCGGGTATTGGCAAATCGGGTGCACAGCCCGCTAAA |
| | | AAGAGACTCAATTTCGGTCAGACTGGCGACACAGAGTCAGTCCCAGACCCTCAACC |
| | | AATCGGAGAACCTCCCGCAGCCCCCTCAGGTGTGGGATCTCTTACAATGGCTTCAG |
| | | GTGGTGGCGCACCAGTGGCAGACAATAACGAAGGTGCCGATGGAGTGGGTAGTTCC |
| | | TCGGGAAATTGGCATTGCGATTCCCAATGGCTGGGGGACAGAGTCATCACCACCAG |
| | | CACCCGAACCTGGGCCCTGCCCACCTACAACAATCACCTCTACAAGCAAATCTCCA |
| | | ACAGCACATCTGGAGGATCTTCAAATGACAACGCCTACTTCGGCTACAGCACCCCC |
| | | TGGGGGTATTTTGACTTCAACAGATTCCACTGCCACTTCTCACCACGTGACTGGCA |
| | | GCGACTCATCAACAACAACTGGGGATTCCGGCCTAAGCGACTCAACTTCAAGCTCT |
| | | TCAACATTCAGGTCAAAGAGGTTACGGACAACAATGGAGTCAAGACCATCGCCAAT |
| | | AACCTTACCAGCACGGTCCAGGTCTTCACGGACTCAGACTATCAGCTCCCGTACGT |
| | | GCTCGGGTCGGCTCACGAGGGCTGCCTCCCGCCGTTCCCAGCGGACGTTTTCATGA |
| | | TTCCTCAGTACGGGTATCTGACGCTTAATGATGGAAGCCAGGCCGTGGGTCGTTCG |
| | | TCCTTTTACTGCCTGGAATATTTCCCGTCGCAAATGCTAAGAACGGGTAACAACTT |
| | | CCAGTTCAGCTACGAGITTGAGAACGTACCTTTCCATAGCAGCTACGCTCACAGCC |
| | | AAAGCCTGGACCGACTAATGAATCCACTCATCGAtCAgTAtcTGTAtTActTgagt |
| | | AAGACGATTAATGGTCATGATTCTCCGCATTCTAAGGCGCAGAATCTGCAGACGET |
| | | gAAgTTttcgGTaGCtGGtCCtAGCAACATGGCTGTCCAGGGAAGAAACTACATAC |
| | | CTGGACCCAGCTACCGACAACAACGTGTCTCAACCACTGTGACTCAAAACAACAAC |
| | | AGCGAATTTGCTTGGCCTGGAGCTTCTTCTTGGGCTCTCAATGGACGTAATAGCTT |
| | | GATGAATCCTGGACCTGCTATGGCCAGCCACAAAGAAGGAGAGGACCGTTTCTTTC |
| | | CTTTGTCTGGATCTTTAATTTTTGGCAAACAAGGAACTGGAAGAGACAACGTGGAT |
| | | GCGGACAAAGTCATGATAACCAACGAAGAAGAAATTAAAACTACTAACCCGGTAGC |
| | | AACGGAGTCCTATGGACAAGtggccacaaaccaccagagtGCCCAAGCACAGGCGC |
| | | AGaccggctgggttcaaaaccaAGGAATACTTCCGGGTATGGTTTGGCAGGACAGA |
| | | GATGTGTACCTGCAAGGACCCATTTGGGCCAAAATTCCTCACACGGACGGCAACTT |
| | | TCACCCTTCTCCGCTGATGGGAGGGTTTGGAATGAAGCACCCGCCTCCTCAGATCC |
| | | TCATCAAAAACACACCTGTACCTGCGGATCCTCCAACGGCCTTCAACAAGGACAAG |
| | | CTGAACTCTTTCATCACCCAGTATTCTACTGGCCAAGTCAGCGTGGAGATCGAGTG |
| | | GGAGCTGCAGAAGGAAAACAGCAAGCGCTGGAACCCGGAGATCCAGTACACTTCCA |
| | | ACTATTACAAGTCTAATAATGTTGAATTTGCTGTTAATACTGAAGGTGTATATAGT |
| | | GAACCCCGCCCCATTGGCACgcGgTAtTAACgaGgAActTa |
| TTM-019 | 28 | ATGGCTGCCGATGGTTATCTTCCAGattggcTCGAGGACAACCTTAGTGAAGGAAT |
| | | TCGCGAGTGGTGGGCTTTGAAACCTGGAGCCCCTCAACCCAAGGCAAATCAACAAC |
| | | ATCAAGACAACGCTCGAGGTCTTGTGCTTCCGGGTTACAAATACCTTGGACCCGGC |
| | | AACGGACTCGACAAGGGGGAGCCGGTCAACGCAGCAGACGCGGCGGCCCTCGAGCA |
| | | CGACAAGGCCTACGACCAGCAGCTCAAGGCCGGAGACAACCCGTACCTCAAGTACA |
| | | ACCACGCCGACGCCGAGTTCCAGGAGCGGCTCAAAGAAGATACGTCTTTTGGGGGC |
| | | AACCTCGGGCGAGCAGTCTTCCAGGCCAAAAAGAGGCTTCTTGAACCTCTTGGTCT |
| | | GGTTGAGGAAGCGGCTAAGACGGCTCCTGGAAAGAAGAGGCCTGTAGAGCAGTCTC |
| | | CTCAGGAACCGGACTCCTCCGCGGGTATTGGCAAATCGGGTGCACAGCCCGCTAAA |
| | | AAGAGACTCAATTTCGGTCAGACTGGCGACACAGAGTCAGTCCCAGACCCTCAACC |
| | | AATCGGAGAACCTCCCGCAGCCCCCTCAGGTGTGGGATCTCTTACAATGGCTTCAG |
| | | GTGGTGGCGCACCAGTGGCAGACAATAACGAAGGTGCCGATGGAGTGGGTAGTTCC |
| | | TCGGGAAATTGGCATTGCGATTCCCAATGGCTGGGGGACAGAGTCATCACCACCAG |
| | | CACCCGAACCTGGGCCCTGCCCACCTACAACAATCACCTCTACAAGCAAATCTCCA |
| | | ACAGCACATCTGGAGGATCTTCAAATGACAACGCCTACTTCGGCTACAGCACCCCC |
| | | TGGGGGTATTTTGACTTCAACAGATTCCACTGCCACTTCTCACCACGTGACTGGCA |
| | | GCGACTCATCAACAACAACTGGGGATTCCGGCCTAAGCGACTCAACTTCAAGCTCT |
| | | TCAACATTCAGGTCAAAGAGGTTACGGACAACAATGGAGTCAAGACCATCGCCAAT |
| | | AACCTTACCAGCACGGTCCAGGTCTTCACGGACTCAGACTATCAGCTCCCGTACGT |
| | | GCTCGGGTCGGCTCACGAGGGCTGCCTCCCGCCGTTCCCAGCGGACGTTTTCATGA |
| | | TTCCTCAGTACGGGTATCTGACGCTTAATGATGGAAGCCAGGCCGTGGGTCGTTCG |
| | | TCCTTTTACTGCCTGGAATATTTCCCGTCGCAAATGCTAAGAACGGGTAACAACTT |
| | | CCAGTTCAGCTACGAGTTTGAGAACGTACCTTTCCATAGCAGCTACGCTCACAGCC |
| | | AAAGCCTGGACCGACTAATGAATCCACTCATCGAtCAgTAtcTGTAtTActTgagt |
| | | AAGACGGTGAATGGTCATGATTCTCCGCATTCTAAGGCGCAGAATCAGCAGACGET |
| | | gAAgTTttcgGTaGCtGGtCCtAGCAACATGGCTGTCCAGGGAAGAAACTACATAC |
| | | CTGGACCCAGCTACCGACAACAACGTGTCTCAACCACTGTGACTCAAAACAACAAC |
| | | AGCGAATTTGCTTGGCCTGGAGCTTCTTCTTGGGCTCTCAATGGACGTAATAGCTT |
| | | GATGAATCCTGGACCTGCTATGGCCAGCCACAAAGAAGGAGAGGACCGTTTCTTTC |
| | | CTTTGTCTGGATCTTTAATTTTTGGCAAACAAGGAACTGGAAGAGACAACGTGGAT |
| | | GCGGACAAAGTCATGATAACCAACGAAGAAGAAATTAAAACTACTAACCCGGTAGC |
| | | AACGGAGTCCTATGGACAAGtggccacaaaccaccagagtGCCCAAGCACAGGCGC |
| | | AGaccggctgggttcaaaaccaAGGAATACTTCCGGGTATGGTTTGGCAGGACAGA |
| | | GATGTGTACCTGCAAGGACCCATTTGGGCCAAAATTCCTCACACGGACGGCAACTT |
| | | TCACCCTTCTCCGCTGATGGGAGGGTTTGGAATGAAGCACCCGCCTCCTCAGATCC |
| | | TCATCAAAAACACACCTGTACCTGCGGATCCTCCAACGGCCTTCAACAAGGACAAG |
| | | CTGAACTCTTTCATCACCCAGTATTCTACTGGCCAAGTCAGCGTGGAGATCGAGTG |
| | | GGAGCTGCAGAAGGAAAACAGCAAGCGCTGGAACCCGGAGATCCAGTACACTTCCA |
| | | ACTATTACAAGTCTAATAATGTTGAATTTGCTGTTAATACTGAAGGTGTATATAGT |
| | | GAACCCCGCCCCATTGGCACgcGgTAttTAACgaGgAActTa |
| TTM-020 | 29 | ATGGCTGCCGATGGTTATCTTCCAGattggcTCGAGGACAACCTTAGTGAAGGAAT |
| | | TCGCGAGTGGTGGGCTTTGAAACCTGGAGCCCCTCAACCCAAGGCAAATCAACAAC |
| | | ATCAAGACAACGCTCGAGGTCTTGTGCTTCCGGGTTACAAATACCTTGGACCCGGC |
| | | AACGGACTCGACAAGGGGGAGCCGGTCAACGCAGCAGACGCGGCGGCCCTCGAGCA |
| | | CGACAAGGCCTACGACCAGCAGCTCAAGGCCGGAGACAACCCGTACCTCAAGTACA |
| | | ACCACGCCGACGCCGAGTTCCAGGAGCGGCTCAAAGAAGATACGTCTTTTGGGGGC |
| | | AACCTCGGGCGAGCAGTCTTCCAGGCCAAAAAGAGGCTTCTTGAACCTCTTGGTCT |
| | | GGTTGAGGAAGCGGCTAAGACGGCTCCTGGAAAGAAGAGGCCTGTAGAGCAGTCTC |
| | | CTCAGGAACCGGACTCCTCCGCGGGTATTGGCAAATCGGGTGCACAGCCCGCTAAA |
| | | AAGAGACTCAATTTCGGTCAGACTGGCGACACAGAGTCAGTCCCAGACCCTCAACC |
| | | AATCGGAGAACCTCCCGCAGCCCCCTCAGGTGTGGGATCTCTTACAATGGCTTCAG |
| | | GTGGTGGCGCACCAGTGGCAGACAATAACGAAGGTGCCGATGGAGTGGGTAGTTCC |
| | | TCGGGAAATTGGCATTGCGATTCCCAATGGCTGGGGGACAGAGTCATCACCACCAG |
| | | CACCCGAACCTGGGCCCTGCCCACCTACAACAATCACCTCTACAAGCAAATCTCCA |
| | | ACAGCACATCTGGAGGATCTTCAAATGACAACGCCTACTTCGGCTACAGCACCCCC |
| | | TGGGGGTATTTTGACTTCAACAGATTCCACTGCCACTTCTCACCACGTGACTGGCA |
| | | GCGACTCATCAACAACAACTGGGGATTCCGGCCTAAGCGACTCAACTTCAAGCTCT |
| | | TCAACATTCAGGTCAAAGAGGTTACGGACAACAATGGAGTCAAGACCATCGCCAAT |
| | | AACCTTACCAGCACGGTCCAGGTCTTCACGGACTCAGACTATCAGCTCCCGTACGT |
| | | GCTCGGGTCGGCTCACGAGGGCTGCCTCCCGCCGTTCCCAGCGGACGTTTTCATGA |
| | | TTCCTCAGTACGGGTATCTGACGCTTAATGATGGAAGCCAGGCCGTGGGTCGTTCG |
| | | TCCTTTTACTGCCTGGAATATTTCCCGTCGCAAATGCTAAGAACGGGTAACAACTT |
| | | CCAGTTCAGCTACGAGITTGAGAACGTACCTTTCCATAGCAGCTACGCTCACAGCC |
| | | AAAGCCTGGACCGACTAATGAATCCACTCATCGAtCAgTAtcTGTAtTActTgagt |
| | | AAGACGATTAATGGTCATGATTCTCCGCATTCTAAGGCGCTGAATCAGCAGACGET |
| | | gAAgTTttcgGTaGCtGGtCCtAGCAACATGGCTGTCCAGGGAAGAAACTACATAC |
| | | CTGGACCCAGCTACCGACAACAACGTGTCTCAACCACTGTGACTCAAAACAACAAC |
| | | AGCGAATTTGCTTGGCCTGGAGCTTCTTCTTGGGCTCTCAATGGACGTAATAGCTT |
| | | GATGAATCCTGGACCTGCTATGGCCAGCCACAAAGAAGGAGAGGACCGTTTCTTTC |
| | | CTTTGTCTGGATCTTTAATTTTTGGCAAACAAGGAACTGGAAGAGACAACGTGGAT |
| | | GCGGACAAAGTCATGATAACCAACGAAGAAGAAATTAAAACTACTAACCCGGTAGC |
| | | AACGGAGTCCTATGGACAAGtggccacaaaccaccagagtGCCCAAGCACAGGCGC |
| | | AGaccggctgggttcaaaaccaAGGAATACTTCCGGGTATGGTTTGGCAGGACAGA |
| | | GATGTGTACCTGCAAGGACCCATTTGGGCCAAAATTCCTCACACGGACGGCAACTT |
| | | TCACCCTTCTCCGCTGATGGGAGGGTTTGGAATGAAGCACCCGCCTCCTCAGATCC |
| | | TCATCAAAAACACACCTGTACCTGCGGATCCTCCAACGGCCTTCAACAAGGACAAG |
| | | CTGAACTCTTTCATCACCCAGTATTCTACTGGCCAAGTCAGCGTGGAGATCGAGTG |
| | | GGAGCTGCAGAAGGAAAACAGCAAGCGCTGGAACCCGGAGATCCAGTACACTTCCA |
| | | ACTATTACAAGTCTAATAATGTTGAATTTGCTGTTAATACTGAAGGTGTATATAGT |
| | | GAACCCCGCCCCATTGGCACgcGgTAttTAACgaGgAActTa |
| TTM-021 | 30 | ATGGCTGCCGATGGTTATCTTCCAGattggcTCGAGGACAACCTTAGTGAAGGAAT |
| | | TCGCGAGTGGTGGGCTTTGAAACCTGGAGCCCCTCAACCCAAGGCAAATCAACAAC |
| | | ATCAAGACAACGCTCGAGGTCTTGTGCTTCCGGGTTACAAATACCTTGGACCCGGC |
| | | AACGGACTCGACAAGGGGGAGCCGGTCAACGCAGCAGACGCGGCGGCCCTCGAGCA |
| | | CGACAAGGCCTACGACCAGCAGCTCAAGGCCGGAGACAACCCGTACCTCAAGTACA |
| | | ACCACGCCGACGCCGAGTTCCAGGAGCGGCTCAAAGAAGATACGTCTTTTGGGGGC |
| | | AACCTCGGGCGAGCAGTCTTCCAGGCCAAAAAGAGGCTTCTTGAACCTCTTGGTCT |
| | | GGTTGAGGAAGCGGCTAAGACGGCTCCTGGAAAGAAGAGGCCTGTAGAGCAGTCTC |
| | | CTCAGGAACCGGACTCCTCCGCGGGTATTGGCAAATCGGGTGCACAGCCCGCTAAA |
| | | AAGAGACTCAATTTCGGTCAGACTGGCGACACAGAGTCAGTCCCAGACCCTCAACC |
| | | AATCGGAGAACCTCCCGCAGCCCCCTCAGGTGTGGGATCTCTTACAATGGCTTCAG |
| | | GTGGTGGCGCACCAGTGGCAGACAATAACGAAGGTGCCGATGGAGTGGGTAGTTCC |
| | | TCGGGAAATTGGCATTGCGATTCCCAATGGCTGGGGGACAGAGTCATCACCACCAG |
| | | CACCCGAACCTGGGCCCTGCCCACCTACAACAATCACCTCTACAAGCAAATCTCCA |
| | | ACAGCACATCTGGAGGATCTTCAAATGACAACGCCTACTTCGGCTACAGCACCCCC |
| | | TGGGGGTATTTTGACTTCAACAGATTCCACTGCCACTTCTCACCACGTGACTGGCA |
| | | GCGACTCATCAACAACAACTGGGGATTCCGGCCTAAGCGACTCAACTTCAAGCTCT |
| | | TCAACATTCAGGTCAAAGAGGTTACGGACAACAATGGAGTCAAGACCATCGCCAAT |
| | | AACCTTACCAGCACGGTCCAGGTCTTCACGGACTCAGACTATCAGCTCCCGTACGT |
| | | GCTCGGGTCGGCTCACGAGGGCTGCCTCCCGCCGTTCCCAGCGGACGTTTTCATGA |
| | | TTCCTCAGTACGGGTATCTGACGCTTAATGATGGAAGCCAGGCCGTGGGTCGTTCG |
| | | TCCTTTTACTGCCTGGAATATTTCCCGTCGCAAATGCTAAGAACGGGTAACAACTT |
| | | CCAGTTCAGCTACGAGITTGAGAACGTACCTTTCCATAGCAGCTACGCTCACAGCC |
| | | AAAGCCTGGACCGACTAATGAATCCACTCATCGAtCAgTAtcTGTAtTActTgagt |
| | | AAGACGATTAATGGTCATGATTCTCCGCATTCTAAGGCGCAGAATCAGCAGTCTET |
| | | gAAgTTttcgGTaGCtGGtCCtAGCAACATGGCTGTCCAGGGAAGAAACTACATAC |
| | | CTGGACCCAGCTACCGACAACAACGTGTCTCAACCACTGTGACTCAAAACAACAAC |
| | | AGCGAATTTGCTTGGCCTGGAGCTTCTTCTTGGGCTCTCAATGGACGTAATAGCTT |
| | | GATGAATCCTGGACCTGCTATGGCCAGCCACAAAGAAGGAGAGGACCGTTTCTTTC |
| | | CTTTGTCTGGATCTTTAATTTTTGGCAAACAAGGAACTGGAAGAGACAACGTGGAT |
| | | GCGGACAAAGTCATGATAACCAACGAAGAAGAAATTAAAACTACTAACCCGGTAGC |
| | | AACGGAGTCCTATGGACAAGtggccacaaaccaccagagtGCCCAAGCACAGGCGC |
| | | AGaccggctgggttcaaaaccaAGGAATACTTCCGGGTATGGTTTGGCAGGACAGA |
| | | GATGTGTACCTGCAAGGACCCATTTGGGCCAAAATTCCTCACACGGACGGCAACTT |
| | | TCACCCTTCTCCGCTGATGGGAGGGTTTGGAATGAAGCACCCGCCTCCTCAGATCC |
| | | TCATCAAAAACACACCTGTACCTGCGGATCCTCCAACGGCCTTCAACAAGGACAAG |
| | | CTGAACTCTTTCATCACCCAGTATTCTACTGGCCAAGTCAGCGTGGAGATCGAGTG |
| | | GGAGCTGCAGAAGGAAAACAGCAAGCGCTGGAACCCGGAGATCCAGTACACTTCCA |
| | | ACTATTACAAGTCTAATAATGTTGAATTTGCTGTTAATACTGAAGGTGTATATAGT |
| | | GAACCCCGCCCCATTGGCACgcGgTAttTAACgaGgAActTa |
| TTM-022 | 31 | ATGGCTGCCGATGGTTATCTTCCAGattggcTCGAGGACAACCTTAGTGAAGGAAT |
| | | TCGCGAGTGGTGGGCTTTGAAACCTGGAGCCCCTCAACCCAAGGCAAATCAACAAC |
| | | ATCAAGACAACGCTCGAGGTCTTGTGCTTCCGGGTTACAAATACCTTGGACCCGGC |
| | | AACGGACTCGACAAGGGGGAGCCGGTCAACGCAGCAGACGCGGCGGCCCTCGAGCA |
| | | CGACAAGGCCTACGACCAGCAGCTCAAGGCCGGAGACAACCCGTACCTCAAGTACA |
| | | ACCACGCCGACGCCGAGTTCCAGGAGCGGCTCAAAGAAGATACGTCTTTTGGGGGC |
| | | AACCTCGGGCGAGCAGTCTTCCAGGCCAAAAAGAGGCTTCTTGAACCTCTTGGTCT |
| | | GGTTGAGGAAGCGGCTAAGACGGCTCCTGGAAAGAAGAGGCCTGTAGAGCAGTCTC |
| | | CTCAGGAACCGGACTCCTCCGCGGGTATTGGCAAATCGGGTGCACAGCCCGCTAAA |
| | | AAGAGACTCAATTTCGGTCAGACTGGCGACACAGAGTCAGTCCCAGACCCTCAACC |
| | | AATCGGAGAACCTCCCGCAGCCCCCTCAGGTGTGGGATCTCTTACAATGGCTTCAG |
| | | GTGGTGGCGCACCAGTGGCAGACAATAACGAAGGTGCCGATGGAGTGGGTAGTTCC |
| | | TCGGGAAATTGGCATTGCGATTCCCAATGGCTGGGGGACAGAGTCATCACCACCAG |
| | | CACCCGAACCTGGGCCCTGCCCACCTACAACAATCACCTCTACAAGCAAATCTCCA |
| | | ACAGCACATCTGGAGGATCTTCAAATGACAACGCCTACTTCGGCTACAGCACCCCC |
| | | TGGGGGTATTTTGACTTCAACAGATTCCACTGCCACTTCTCACCACGTGACTGGCA |
| | | GCGACTCATCAACAACAACTGGGGATTCCGGCCTAAGCGACTCAACTTCAAGCTCT |
| | | TCAACATTCAGGTCAAAGAGGTTACGGACAACAATGGAGTCAAGACCATCGCCAAT |
| | | GCTCGGGTCGGCTCACGAGGGCTGCCTCCCGCCGTTCCCAGCGGACGTTTTCATGA |
| | | AACCTTACCAGCACGGTCCAGGTCTTCACGGACTCAGACTATCAGCTCCCGTACGT |
| | | GCTCGGGTCGGCTCACGAGGGCTGCCTCCCGCCGTTCCCAGCGGACGTTTTCATGA |
| | | TTCCTCAGTACGGGTATCTGACGCTTAATGATGGAAGCCAGGCCGTGGGTCGTTCG |
| | | TCCTTTTACTGCCTGGAATATTTCCCGTCGCAAATGCTAAGAACGGGTAACAACTT |
| | | CCAGTTCAGCTACGAGTTTGAGAACGTACCTTTCCATAGCAGCTACGCTCACAGCC |
| | | AAAGCCTGGACCGACTAATGAATCCACTCATCGAtCAgTAtcTGTAtTActTgagt |
| | | AAGACGATTAATGGTCATGATTCTCCGCATTCTAAGGCGCAGAATCAGCAGATTET |
| | | gAAgTTttcgGTaGCtGGtCCtAGCAACATGGCTGTCCAGGGAAGAAACTACATAC |
| | | CTGGACCCAGCTACCGACAACAACGTGTCTCAACCACTGTGACTCAAAACAACAAC |
| | | AGCGAATTTGCTTGGCCTGGAGCTTCTTCTTGGGCTCTCAATGGACGTAATAGCTT |
| | | GATGAATCCTGGACCTGCTATGGCCAGCCACAAAGAAGGAGAGGACCGTTTCTTTC |
| | | CTTTGTCTGGATCTTTAATTTTTGGCAAACAAGGAACTGGAAGAGACAACGTGGAT |
| | | GCGGACAAAGTCATGATAACCAACGAAGAAGAAATTAAAACTACTAACCCGGTAGC |
| | | AACGGAGTCCTATGGACAAGtggccacaaaccaccagagtGCCCAAGCACAGGCGC |
| | | AGaccggctgggttcaaaaccaAGGAATACTTCCGGGTATGGTTTGGCAGGACAGA |
| | | GATGTGTACCTGCAAGGACCCATTTGGGCCAAAATTCCTCACACGGACGGCAACTT |
| | | TCACCCTTCTCCGCTGATGGGAGGGTTTGGAATGAAGCACCCGCCTCCTCAGATCC |
| | | TCATCAAAAACACACCTGTACCTGCGGATCCTCCAACGGCCTTCAACAAGGACAAG |
| | | CTGAACTCTTTCATCACCCAGTATTCTACTGGCCAAGTCAGCGTGGAGATCGAGTG |
| | | GGAGCTGCAGAAGGAAAACAGCAAGCGCTGGAACCCGGAGATCCAGTACACTTCCA |
| | | ACTATTACAAGTCTAATAATGTTGAATTTGCTGTTAATACTGAAGGTGTATATAGT |
| | | GAACCCCGCCCCATTGGCACgcGgTAttTAACgaGgAActTa |
| TTM-023 | 32 | ATGGCTGCCGATGGTTATCTTCCAGattggcTCGAGGACAACCTTAGTGAAGGAAT |
| | | TCGCGAGTGGTGGGCTTTGAAACCTGGAGCCCCTCAACCCAAGGCAAATCAACAAC |
| | | ATCAAGACAACGCTCGAGGTCTTGTGCTTCCGGGTTACAAATACCTTGGACCCGGC |
| | | AACGGACTCGACAAGGGGGAGCCGGTCAACGCAGCAGACGCGGCGGCCCTCGAGCA |
| | | CGACAAGGCCTACGACCAGCAGCTCAAGGCCGGAGACAACCCGTACCTCAAGTACA |
| | | ACCACGCCGACGCCGAGTTCCAGGAGCGGCTCAAAGAAGATACGTCTTTTGGGGGC |
| | | AACCTCGGGCGAGCAGTCTTCCAGGCCAAAAAGAGGCTTCTTGAACCTCTTGGTCT |
| | | GGTTGAGGAAGCGGCTAAGACGGCTCCTGGAAAGAAGAGGCCTGTAGAGCAGTCTC |
| | | CTCAGGAACCGGACTCCTCCGCGGGTATTGGCAAATCGGGTGCACAGCCCGCTAAA |
| | | AAGAGACTCAATTTCGGTCAGACTGGCGACACAGAGTCAGTCCCAGACCCTCAACC |
| | | AATCGGAGAACCTCCCGCAGCCCCCTCAGGTGTGGGATCTCTTACAATGGCTTCAG |
| | | GTGGTGGCGCACCAGTGGCAGACAATAACGAAGGTGCCGATGGAGTGGGTAGTTCC |
| | | TCGGGAAATTGGCATTGCGATTCCCAATGGCTGGGGGACAGAGTCATCACCACCAG |
| | | CACCCGAACCTGGGCCCTGCCCACCTACAACAATCACCTCTACAAGCAAATCTCCA |
| | | ACAGCACATCTGGAGGATCTTCAAATGACAACGCCTACTTCGGCTACAGCACCCCC |
| | | TGGGGGTATTTTGACTTCAACAGATTCCACTGCCACTTCTCACCACGTGACTGGCA |
| | | GCGACTCATCAACAACAACTGGGGATTCCGGCCTAAGCGACTCAACTTCAAGCTCT |
| | | TCAACATTCAGGTCAAAGAGGTTACGGACAACAATGGAGTCAAGACCATCGCCAAT |
| | | AACCTTACCAGCACGGTCCAGGTCTTCACGGACTCAGACTATCAGCTCCCGTACGT |
| | | GCTCGGGTCGGCTCACGAGGGCTGCCTCCCGCCGTTCCCAGCGGACGTTTTCATGA |
| | | TTCCTCAGTACGGGTATCTGACGCTTAATGATGGAAGCCAGGCCGTGGGTCGTTCG |
| | | TCCTTTTACTGCCTGGAATATTTCCCGTCGCAAATGCTAAGAACGGGTAACAACTT |
| | | CCAGTTCAGCTACGAGTTTGAGAACGTACCTTTCCATAGCAGCTACGCTCACAGCC |
| | | AAAGCCTGGACCGACTAATGAATCCACTCATCGAtCAgTAtcTGTAtTActTgagt |
| | | AAGACGATTAATGGTTCTGGTTCTCCGCATTTTACGCGTCAGAATCAGCAGACGET |
| | | gAAgTTttcgGTaGCtGGtCCtAGCAACATGGCTGTCCAGGGAAGAAACTACATAC |
| | | CTGGACCCAGCTACCGACAACAACGTGTCTCAACCACTGTGACTCAAAACAACAAC |
| | | AGCGAATTTGCTTGGCCTGGAGCTTCTTCTTGGGCTCTCAATGGACGTAATAGCTT |
| | | GATGAATCCTGGACCTGCTATGGCCAGCCACAAAGAAGGAGAGGACCGTTTCTTTC |
| | | CTTTGTCTGGATCTTTAATTTTTGGCAAACAAGGAACTGGAAGAGACAACGTGGAT |
| | | GCGGACAAAGTCATGATAACCAACGAAGAAGAAATTAAAACTACTAACCCGGTAGC |
| | | AACGGAGTCCTATGGACAAGtggccacaaaccaccagagtGCCCAAGCACAGGCGC |
| | | AGaccggctgggttcaaaaccaAGGAATACTTCCGGGTATGGTTTGGCAGGACAGA |
| | | GATGTGTACCTGCAAGGACCCATTTGGGCCAAAATTCCTCACACGGACGGCAACTT |
| | | TCACCCTTCTCCGCTGATGGGAGGGTTTGGAATGAAGCACCCGCCTCCTCAGATCC |
| | | TCATCAAAAACACACCTGTACCTGCGGATCCTCCAACGGCCTTCAACAAGGACAAG |
| | | CTGAACTCTTTCATCACCCAGTATTCTACTGGCCAAGTCAGCGTGGAGATCGAGTG |
| | | GGAGCTGCAGAAGGAAAACAGCAAGCGCTGGAACCCGGAGATCCAGTACACTTCCA |
| | | ACTATTACAAGTCTAATAATGTTGAATTTGCTGTTAATACTGAAGGTGTATATAGT |
| | | GAACCCCGCCCCATTGGCACgcGgTAttTAACgaGgAActTa |
| TTM-024 | 33 | ATGGCTGCCGATGGTTATCTTCCAGattggcTCGAGGACAACCTTAGTGAAGGAAT |
| | | TCGCGAGTGGTGGGCTTTGAAACCTGGAGCCCCTCAACCCAAGGCAAATCAACAAC |
| | | ATCAAGACAACGCTCGAGGTCTTGTGCTTCCGGGTTACAAATACCTTGGACCCGGC |
| | | AACGGACTCGACAAGGGGGAGCCGGTCAACGCAGCAGACGCGGCGGCCCTCGAGCA |
| | | CGACAAGGCCTACGACCAGCAGCTCAAGGCCGGAGACAACCCGTACCTCAAGTACA |
| | | ACCACGCCGACGCCGAGTTCCAGGAGCGGCTCAAAGAAGATACGTCTTTTGGGGGC |
| | | AACCTCGGGCGAGCAGTCTTCCAGGCCAAAAAGAGGCTTCTTGAACCTCTTGGTCT |
| | | GGTTGAGGAAGCGGCTAAGACGGCTCCTGGAAAGAAGAGGCCTGTAGAGCAGTCTC |
| | | CTCAGGAACCGGACTCCTCCGCGGGTATTGGCAAATCGGGTGCACAGCCCGCTAAA |
| | | AAGAGACTCAATTTCGGTCAGACTGGCGACACAGAGTCAGTCCCAGACCCTCAACC |
| | | AATCGGAGAACCTCCCGCAGCCCCCTCAGGTGTGGGATCTCTTACAATGGCTTCAG |
| | | GTGGTGGCGCACCAGTGGCAGACAATAACGAAGGTGCCGATGGAGTGGGTAGTTCC |
| | | TCGGGAAATTGGCATTGCGATTCCCAATGGCTGGGGGACAGAGTCATCACCACCAG |
| | | CACCCGAACCTGGGCCCTGCCCACCTACAACAATCACCTCTACAAGCAAATCTCCA |
| | | ACAGCACATCTGGAGGATCTTCAAATGACAACGCCTACTTCGGCTACAGCACCCCC |
| | | TGGGGGTATTTTGACTTCAACAGATTCCACTGCCACTTCTCACCACGTGACTGGCA |
| | | GCGACTCATCAACAACAACTGGGGATTCCGGCCTAAGCGACTCAACTTCAAGCTCT |
| | | TCAACATTCAGGTCAAAGAGGTTACGGACAACAATGGAGTCAAGACCATCGCCAAT |
| | | AACCTTACCAGCACGGTCCAGGTCTTCACGGACTCAGACTATCAGCTCCCGTACGT |
| | | GCTCGGGTCGGCTCACGAGGGCTGCCTCCCGCCGTTCCCAGCGGACGTTTTCATGA |
| | | TTCCTCAGTACGGGTATCTGACGCTTAATGATGGAAGCCAGGCCGTGGGTCGTTCG |
| | | TCCTTTTACTGCCTGGAATATTTCCCGTCGCAAATGCTAAGAACGGGTAACAACTT |
| | | CCAGTTCAGCTACGAGTTTGAGAACGTACCTTTCCATAGCAGCTACGCTCACAGCC |
| | | AAAGCCTGGACCGACTAATGAATCCACTCATCGAtCAgTAtcTGTAtTActTgagt |
| | | AAGACGTCTAATGGTCATGATTCTCCGCATTCTAAGGCGCAGAATCAGCAGACGET |
| | | gAAgTTttcgGTaGCtGGtCCtAGCAACATGGCTGTCCAGGGAAGAAACTACATAC |
| | | CTGGACCCAGCTACCGACAACAACGTGTCTCAACCACTGTGACTCAAAACAACAAC |
| | | AGCGAATTTGCTTGGCCTGGAGCTTCTTCTTGGGCTCTCAATGGACGTAATAGCTT |
| | | GATGAATCCTGGACCTGCTATGGCCAGCCACAAAGAAGGAGAGGACCGTTTCTTTC |
| | | CTTTGTCTGGATCTTTAATTTTTGGCAAACAAGGAACTGGAAGAGACAACGTGGAT |
| | | GCGGACAAAGTCATGATAACCAACGAAGAAGAAATTAAAACTACTAACCCGGTAGC |
| | | AACGGAGTCCTATGGACAAGtggccacaaaccaccagagtGCCCAAGCACAGGCGC |
| | | AGaccggctgggttcaaaaccaAGGAATACTTCCGGGTATGGTTTGGCAGGACAGA |
| | | GATGTGTACCTGCAAGGACCCATTTGGGCCAAAATTCCTCACACGGACGGCAACTT |
| | | TCACCCTTCTCCGCTGATGGGAGGGTTTGGAATGAAGCACCCGCCTCCTCAGATCC |
| | | TCATCAAAAACACACCTGTACCTGCGGATCCTCCAACGGCCTTCAACAAGGACAAG |
| | | CTGAACTCTTTCATCACCCAGTATTCTACTGGCCAAGTCAGCGTGGAGATCGAGTG |
| | | GGAGCTGCAGAAGGAAAACAGCAAGCGCTGGAACCCGGAGATCCAGTACACTTCCA |
| | | ACTATTACAAGTCTAATAATGTTGAATTTGCTGTTAATACTGAAGGTGTATATAGT |
| | | GAACCCCGCCCCATTGGCACgcGgTAttTAACgaGgAActTa |
| TTM-025 | 34 | ATGGCTGCCGATGGTTATCTTCCAGattggcTCGAGGACAACCTTAGTGAAGGAAT |
| | | TCGCGAGTGGTGGGCTTTGAAACCTGGAGCCCCTCAACCCAAGGCAAATCAACAAC |
| | | ATCAAGACAACGCTCGAGGTCTTGTGCTTCCGGGTTACAAATACCTTGGACCCGGC |
| | | AACGGACTCGACAAGGGGGAGCCGGTCAACGCAGCAGACGCGGCGGCCCTCGAGCA |
| | | CGACAAGGCCTACGACCAGCAGCTCAAGGCCGGAGACAACCCGTACCTCAAGTACA |
| | | ACCACGCCGACGCCGAGTTCCAGGAGCGGCTCAAAGAAGATACGTCTTTTGGGGGC |
| | | AACCTCGGGCGAGCAGTCTTCCAGGCCAAAAAGAGGCTTCTTGAACCTCTTGGTCT |
| | | GGTTGAGGAAGCGGCTAAGACGGCTCCTGGAAAGAAGAGGCCTGTAGAGCAGTCTC |
| | | CTCAGGAACCGGACTCCTCCGCGGGTATTGGCAAATCGGGTGCACAGCCCGCTAAA |
| | | AAGAGACTCAATTTCGGTCAGACTGGCGACACAGAGTCAGTCCCAGACCCTCAACC |
| | | AATCGGAGAACCTCCCGCAGCCCCCTCAGGTGTGGGATCTCTTACAATGGCTTCAG |
| | | GTGGTGGCGCACCAGTGGCAGACAATAACGAAGGTGCCGATGGAGTGGGTAGTTCC |
| | | TCGGGAAATTGGCATTGCGATTCCCAATGGCTGGGGGACAGAGTCATCACCACCAG |
| | | CACCCGAACCTGGGCCCTGCCCACCTACAACAATCACCTCTACAAGCAAATCTCCA |
| | | ACAGCACATCTGGAGGATCTTCAAATGACAACGCCTACTTCGGCTACAGCACCCCC |
| | | TGGGGGTATTTTGACTTCAACAGATTCCACTGCCACTTCTCACCACGTGACTGGCA |
| | | GCGACTCATCAACAACAACTGGGGATTCCGGCCTAAGCGACTCAACTTCAAGCTCT |
| | | TCAACATTCAGGTCAAAGAGGTTACGGACAACAATGGAGTCAAGACCATCGCCAAT |
| | | AACCTTACCAGCACGGTCCAGGTCTTCACGGACTCAGACTATCAGCTCCCGTACGT |
| | | GCTCGGGTCGGCTCACGAGGGCTGCCTCCCGCCGTTCCCAGCGGACGTTTTCATGA |
| | | TTCCTCAGTACGGGTATCTGACGCTTAATGATGGAAGCCAGGCCGTGGGTCGTTCG |
| | | TCCTTTTACTGCCTGGAATATTTCCCGTCGCAAATGCTAAGAACGGGTAACAACTT |
| | | CCAGTTCAGCTACGAGTTTGAGAACGTACCTTTCCATAGCAGCTACGCTCACAGCC |
| | | AAGACGATTAATGGTTCTGGTTCTCCGCATTCTCTGCCGTGGAATCAGCAGACGET |
| | | AAAGCCTGGACCGACTAATGAATCCACTCATCGAtCAgTAtcTGTAtTActTgagt |
| | | AAGACGATTAATGGTTCTGGTTCTCCGCATTCTCTGCCGTGGAATCAGCAGACGET |
| | | gAAgTTttcgGTaGCtGGtCCtAGCAACATGGCTGTCCAGGGAAGAAACTACATAC |
| | | CTGGACCCAGCTACCGACAACAACGTGTCTCAACCACTGTGACTCAAAACAACAAC |
| | | AGCGAATTTGCTTGGCCTGGAGCTTCTTCTTGGGCTCTCAATGGACGTAATAGCTT |
| | | GATGAATCCTGGACCTGCTATGGCCAGCCACAAAGAAGGAGAGGACCGTTTCTTTC |
| | | CTTTGTCTGGATCTTTAATTTTTGGCAAACAAGGAACTGGAAGAGACAACGTGGAT |
| | | GCGGACAAAGTCATGATAACCAACGAAGAAGAAATTAAAACTACTAACCCGGTAGC |
| | | AACGGAGTCCTATGGACAAGtggccacaaaccaccagagtGCCCAAGCACAGGCGC |
| | | AGaccggctgggttcaaaaccaAGGAATACTTCCGGGTATGGTTTGGCAGGACAGA |
| | | GATGTGTACCTGCAAGGACCCATTTGGGCCAAAATTCCTCACACGGACGGCAACTT |
| | | TCACCCTTCTCCGCTGATGGGAGGGTTTGGAATGAAGCACCCGCCTCCTCAGATCC |
| | | TCATCAAAAACACACCTGTACCTGCGGATCCTCCAACGGCCTTCAACAAGGACAAG |
| | | CTGAACTCTTTCATCACCCAGTATTCTACTGGCCAAGTCAGCGTGGAGATCGAGTG |
| | | GGAGCTGCAGAAGGAAAACAGCAAGCGCTGGAACCCGGAGATCCAGTACACTTCCA |
| | | ACTATTACAAGTCTAATAATGTTGAATTTGCTGTTAATACTGAAGGTGTATATAGT |
| | | GAACCCCGCCCCATTGGCACgcGgTAttTAACgaGgAActTa |
| TTM-026 | 35 | ATGGCTGCCGATGGTTATCTTCCAGattggcTCGAGGACAACCTTAGTGAAGGAAT |
| | | TCGCGAGTGGTGGGCTTTGAAACCTGGAGCCCCTCAACCCAAGGCAAATCAACAAC |
| | | ATCAAGACAACGCTCGAGGTCTTGTGCTTCCGGGTTACAAATACCTTGGACCCGGC |
| | | AACGGACTCGACAAGGGGGAGCCGGTCAACGCAGCAGACGCGGCGGCCCTCGAGCA |
| | | CGACAAGGCCTACGACCAGCAGCTCAAGGCCGGAGACAACCCGTACCTCAAGTACA |
| | | ACCACGCCGACGCCGAGTTCCAGGAGCGGCTCAAAGAAGATACGTCTTTTGGGGGC |
| | | AACCTCGGGCGAGCAGTCTTCCAGGCCAAAAAGAGGCTTCTTGAACCTCTTGGTCT |
| | | GGTTGAGGAAGCGGCTAAGACGGCTCCTGGAAAGAAGAGGCCTGTAGAGCAGTCTC |
| | | CTCAGGAACCGGACTCCTCCGCGGGTATTGGCAAATCGGGTGCACAGCCCGCTAAA |
| | | AAGAGACTCAATTTCGGTCAGACTGGCGACACAGAGTCAGTCCCAGACCCTCAACC |
| | | AATCGGAGAACCTCCCGCAGCCCCCTCAGGTGTGGGATCTCTTACAATGGCTTCAG |
| | | GTGGTGGCGCACCAGTGGCAGACAATAACGAAGGTGCCGATGGAGTGGGTAGTTCC |
| | | TCGGGAAATTGGCATTGCGATTCCCAATGGCTGGGGGACAGAGTCATCACCACCAG |
| | | CACCCGAACCTGGGCCCTGCCCACCTACAACAATCACCTCTACAAGCAAATCTCCA |
| | | ACAGCACATCTGGAGGATCTTCAAATGACAACGCCTACTTCGGCTACAGCACCCCC |
| | | TGGGGGTATTTTGACTTCAACAGATTCCACTGCCACTTCTCACCACGTGACTGGCA |
| | | GCGACTCATCAACAACAACTGGGGATTCCGGCCTAAGCGACTCAACTTCAAGCTCT |
| | | TCAACATTCAGGTCAAAGAGGTTACGGACAACAATGGAGTCAAGACCATCGCCAAT |
| | | AACCTTACCAGCACGGTCCAGGTCTTCACGGACTCAGACTATCAGCTCCCGTACGT |
| | | GCTCGGGTCGGCTCACGAGGGCTGCCTCCCGCCGTTCCCAGCGGACGTTTTCATGA |
| | | TTCCTCAGTACGGGTATCTGACGCTTAATGATGGAAGCCAGGCCGTGGGTCGTTCG |
| | | TCCTTTTACTGCCTGGAATATTTCCCGTCGCAAATGCTAAGAACGGGTAACAACTT |
| | | CCAGTTCAGCTACGAGTTTGAGAACGTACCTTTCCATAGCAGCTACGCTCACAGCC |
| | | AAAGCCTGGACCGACTAATGAATCCACTCATCGAtCAgTAtcTGTAtTActTgagt |
| | | AAGACGATTAATGGTCATGATTCTCCGCATTCTAAGGCGCAGAATCATCAGACGET |
| | | gAAgTTttcgGTaGCtGGtCCtAGCAACATGGCTGTCCAGGGAAGAAACTACATAC |
| | | CTGGACCCAGCTACCGACAACAACGTGTCTCAACCACTGTGACTCAAAACAACAAC |
| | | AGCGAATTTGCTTGGCCTGGAGCTTCTTCTTGGGCTCTCAATGGACGTAATAGCTT |
| | | GATGAATCCTGGACCTGCTATGGCCAGCCACAAAGAAGGAGAGGACCGTTTCTTTC |
| | | CTTTGTCTGGATCITTAATTTTTGGCAAACAAGGAACTGGAAGAGACAACGTGGAT |
| | | GCGGACAAAGTCATGATAACCAACGAAGAAGAAATTAAAACTACTAACCCGGTAGC |
| | | AACGGAGTCCTATGGACAAGtggccacaaaccaccagagtGCCCAAGCACAGGCGC |
| | | AGaccggctgggttcaaaaccaAGGAATACTTCCGGGTATGGTTTGGCAGGACAGA |
| | | GATGTGTACCTGCAAGGACCCATTTGGGCCAAAATTCCTCACACGGACGGCAACTT |
| | | TCACCCTTCTCCGCTGATGGGAGGGTTTGGAATGAAGCACCCGCCTCCTCAGATCC |
| | | TCATCAAAAACACACCTGTACCTGCGGATCCTCCAACGGCCTTCAACAAGGACAAG |
| | | CTGAACTCTTTCATCACCCAGTATTCTACTGGCCAAGTCAGCGTGGAGATCGAGTG |
| | | GGAGCTGCAGAAGGAAAACAGCAAGCGCTGGAACCCGGAGATCCAGTACACTTCCA |
| | | ACTATTACAAGTCTAATAATGTTGAATTTGCTGTTAATACTGAAGGTGTATATAGT |
| | | GAACCCCGCCCCATTGGCACgcGgTAttTAACgaGgAActTa |

[0941] In some embodiments, the polynucleotide encoding an AAV capsid variant, described herein comprises the nucleotide sequence of SEQ ID NO: 983 or 984, or a nucleotide sequence with at least 70% (e.g., at least about 80, 85, 90, 95, 96, 97, 98, or 99%) sequence identity thereto.

[0942] In some embodiments, the polynucleotide encoding an AAV capsid variant, described herein comprises the nucleotide sequence of any one of SEQ ID NOs: 6553-6556 or 16-35, or a nucleotide sequence with at least 70% (e.g., at least about 80, 85, 90, 95, 96, 97, 98, or 99%) sequence identity thereto.

[0943] In some embodiments, the polynucleotide encoding an AAV capsid variant described herein comprises the nucleotide sequence of SEQ ID NO: 983, or a nucleotide sequence with at least 70% (e.g., at least about 80, 85, 90, 95, 96, 97, 98, or 99%) sequence identity thereto. In some embodiments, the nucleotide sequence encoding an AAV capsid variant described herein, comprises a nucleotide sequence comprising at least one, two or three modifications, e.g., substitutions (e.g., conservative substitutions), insertions, or deletions, but not more than 30, 20 or 10 modifications, e.g., substitutions (e.g., conservative substitutions), insertions, or deletions, relative to the nucleotide sequence of SEQ ID NO: 983. In some embodiments, the nucleotide sequence encoding an AAV capsid variant described herein, comprises a nucleotide sequence comprising at least one, two or three, but not more than 30, 20 or 10 different nucleotides relative to the amino acid sequence of SEQ ID NO: 983. In some embodiments, the nucleic acid sequence encoding an AAV capsid variant described herein is codon optimized.

[0944] In some embodiments, the polynucleotide encoding an AAV capsid variant described herein comprises the nucleotide sequence of SEQ ID NO: 984, or a nucleotide sequence with at least 70% (e.g., at least about 80, 85, 90, 95, 96, 97, 98, or 99%) sequence identity thereto. In some embodiments, the nucleotide sequence encoding an AAV capsid variant described herein, comprises a nucleotide sequence comprising at least one, two or three modifications, e.g., substitutions (e.g., conservative substitutions), insertions, or deletions, but not more than 30, 20 or 10 modifications, e.g., substitutions (e.g., conservative substitutions), insertions, or deletions, relative to the nucleotide sequence of SEQ ID NO: 984. In some embodiments, the nucleotide sequence encoding an AAV capsid variant described herein, comprises a nucleotide sequence comprising at least one, two or three, but not more than 30, 20 or 10 different nucleotides, relative to the amino acid sequence of SEQ ID NO: 984. In some embodiments, the nucleic acid sequence encoding an AAV capsid variant described herein is codon optimized.

[0945] In some embodiments, an AAV capsid variant described herein comprises the amino acid sequence of SEQ ID NO: 36-59, 981, or 982, or an amino acid sequence with at least 70% (e.g., at least about 80, 85, 90, 95, 96, 97, 98, or 99%) sequence identity thereto. In some embodiments, an AAV capsid variant described herein comprises an amino acid sequence comprising at least one, two, or three modifications, e.g., substitutions (e.g., conservative substitutions), insertions, or deletions, but not more than 30, 20 or 10 modifications, e.g., substitutions (e.g., conservative substitutions), insertions, or deletions, relative to the amino acid sequence of SEQ ID NO: 36-59, 981, or 982. In some embodiments, the AAV capsid variant, comprises an amino acid sequence comprising at least one, two or three, but not more than 30, 20 or 10 different amino acids, relative to the amino acid sequence of SEQ ID NO: 36-59, 981, or 982.

[0946] In some embodiments, an AAV capsid variant described herein comprises the amino acid sequence of SEQ ID NO: 36, or an amino acid sequence with at least 70% (e.g., at least about 80, 85, 90, 95, 96, 97, 98, or 99%) sequence identity thereto. In some embodiments, an AAV capsid variant described herein comprises an amino acid sequence comprising at least one, two, or three modifications, e.g., substitutions (e.g., conservative substitutions), insertions, or deletions, but not more than 30, 20 or 10 modifications, e.g., substitutions (e.g., conservative substitutions), insertions, or deletions, relative to the amino acid sequence of SEQ ID NO: 36. In some embodiments, the AAV capsid variant, comprises an amino acid sequence comprising at least one, two or three, but not more than 30, 20 or 10 different amino acids, relative to the amino acid sequence of SEQ ID NO: 36.

[0947] In some embodiments, an AAV capsid variant described herein comprises the amino acid sequence of SEQ ID NO: 39, or an amino acid sequence with at least 70% (e.g., at least about 80, 85, 90, 95, 96, 97, 98, or 99%) sequence identity thereto. In some embodiments, an AAV capsid variant described herein comprises an amino acid sequence comprising at least one, two, or three modifications, e.g., substitutions (e.g., conservative substitutions), insertions, or deletions, but not more than 30, 20 or 10 modifications, e.g., substitutions (e.g., conservative substitutions), insertions, or deletions, relative to the amino acid sequence of SEQ ID NO: 39. In some embodiments, the AAV capsid variant, comprises an amino acid sequence comprising at least one, two or three, but not more than 30, 20 or 10 different amino acids, relative to the amino acid sequence of SEQ ID NO: 39.

[0948] In some embodiments, an AAV capsid variant described herein comprises the amino acid sequence of SEQ ID NO: 51, or an amino acid sequence with at least 70% (e.g., at least about 80, 85, 90, 95, 96, 97, 98, or 99%) sequence identity thereto. In some embodiments, an AAV capsid variant described herein comprises an amino acid sequence comprising at least one, two, or three modifications, e.g., substitutions (e.g., conservative substitutions), insertions, or deletions, but not more than 30, 20 or 10 modifications, e.g., substitutions (e.g., conservative substitutions), insertions, or deletions, relative to the amino acid sequence of SEQ ID NO: 51. In some embodiments, the AAV capsid variant, comprises an amino acid sequence comprising at least one, two or three, but not more than 30, 20 or 10 different amino acids, relative to the amino acid sequence of SEQ ID NO: 51.

[0949] In some embodiments, an AAV capsid variant described herein comprises the amino acid sequence of SEQ ID NO: 52, or an amino acid sequence with at least 70% (e.g., at least about 80, 85, 90, 95, 96, 97, 98, or 99%) sequence identity thereto. In some embodiments, an AAV capsid variant described herein comprises an amino acid sequence comprising at least one, two, or three modifications, e.g., substitutions (e.g., conservative substitutions), insertions, or deletions, but not more than 30, 20 or 10 modifications, e.g., substitutions (e.g., conservative substitutions), insertions, or deletions, relative to the amino acid sequence of SEQ ID NO: 52. In some embodiments, the AAV capsid variant, comprises an amino acid sequence comprising at least one, two or three, but not more than 30, 20 or 10 different amino acids, relative to the amino acid sequence of SEQ ID NO: 52.

[0950] In some embodiments, an AAV capsid variant described herein, comprises the amino acid sequence of SEQ ID NO: 981, or an amino acid sequence with at least 70% (e.g., at least about 80, 85, 90, 95, 96, 97, 98, or 99%) sequence identity thereto. In some embodiments, an AAV capsid variant described herein comprises an amino acid sequence comprising at least one, two, or three modifications, e.g., substitutions (e.g., conservative substitutions), insertions, or deletions, but not more than 30, 20 or 10 modifications, e.g., substitutions (e.g., conservative substitutions), insertions, or deletions, relative to the amino acid sequence of SEQ ID NO: 981. In some embodiments, an AAV capsid variant described herein comprises an amino acid sequence comprising at least one, two or three, but not more than 30, 20 or 10 different amino acids, relative to the amino acid sequence of SEQ ID NO: 981.

[0951] In some embodiments, an AAV capsid variant described herein comprises the amino acid sequence of SEQ ID NO: 982, or an amino acid sequence with at least 70% (e.g., at least about 80, 85, 90, 95, 96, 97, 98, or 99%) sequence identity thereto. In some embodiments, an AAV capsid variant described herein comprises an amino acid sequence comprising at least one, two, or three modifications, e.g., substitutions (e.g., conservative substitutions), insertions, or deletions, but not more than 30, 20 or 10 modifications, e.g., substitutions (e.g., conservative substitutions), insertions, or deletions, relative to the amino acid sequence of SEQ ID NO: 982. In some embodiments, the AAV capsid variant, comprises an amino acid sequence comprising at least one, two or three, but not more than 30, 20 or 10 different amino acids, relative to the amino acid sequence of SEQ ID NO: 982.

[0952] In some embodiments, an AAV capsid variant described herein comprises an amino acid sequence encoded by the nucleotide sequence of SEQ ID NO: 983 or 984, or a nucleotide sequence with at least 70% (e.g., at least about 80, 85, 90, 95, 96, 97, 98, or 99%) sequence identity thereto. In some embodiments, an AAV capsid variant described herein comprises an amino acid sequence encoded by a nucleotide sequence comprising at least one, two or three, but not more than 30, 20 or 10 different nucleotides, relative to the amino acid sequence of SEQ ID NO: 983 or 984. In some embodiments, an AAV capsid variant described herein comprises an amino acid sequence encoded by a nucleotide sequence comprising at least one, two or three modifications, e.g., substitutions, insertions, or deletions, but not more than 30, 20 or 10 modifications, e.g., substitutions, insertions, or deletions, relative to the nucleotide sequence of SEQ ID NO: 983 or 984.

[0953] In some embodiments, an AAV capsid variant described herein comprises an amino acid sequence encoded by the nucleotide sequence of any one of SEQ ID NOs: 6553-6556 or 16-35, or a nucleotide sequence with at least 70% (e.g., at least about 80, 85, 90, 95, 96, 97, 98, or 99%) sequence identity thereto. In some embodiments, an AAV capsid variant described herein comprises an amino acid sequence encoded by a nucleotide sequence comprising at least one, two or three, but not more than 30, 20 or 10 different nucleotides, relative to the amino acid sequence of any one of SEQ ID NOs: 6553-6556 or 16-35. In some embodiments, an AAV capsid variant described herein comprises an amino acid sequence encoded by a nucleotide sequence comprising at least one, two or three modifications, e.g., substitutions, insertions, or deletions, but not more than 30, 20 or 10 modifications, e.g., substitutions, insertions, or deletions, relative to the nucleotide sequence of any one of SEQ ID NOs: 6553-6556 or 16-35.

[0954] In some embodiments, an AAV capsid variant described herein comprises a VP1, VP2, VP3 protein, or a combination thereof. In some embodiments, an AAV capsid variant comprises the amino acid sequence corresponding to positions 138-742, e.g., a VP2, of SEQ ID NO: 981 or 982, or a sequence with at least 70% (e.g., at least about 80, 85, 90, 95, 96, 97, 98, or 99%) sequence identity thereto. In some embodiments, the AAV capsid protein comprises the amino acid sequence corresponding to positions 203-742, e.g., a VP3, of SEQ ID NO: 981 or 982, or a sequence with at least 70% (e.g., at least about 80, 85, 90, 95, 96, 97, 98, or 99%) sequence identity thereto. In some embodiments, the AAV capsid variant comprises the amino acid sequence corresponding to positions 1-742, e.g., a VP1, of SEQ ID NO: 981 or 982, or an amino acid sequence with at least 70% (e.g., at least about 80, 85, 90, 95, 96, 97, 98, or 99%) sequence identity thereto.

[0955] In some embodiments, an AAV capsid variant described herein comprises a VP1, VP2, VP3 protein, or a combination thereof. In some embodiments, an AAV capsid variant comprises the amino acid sequence corresponding to positions 138-742, e.g., a VP2, of any one of SEQ ID NOs: 36-59, or a sequence with at least 70% (e.g., at least about 80, 85, 90, 95, 96, 97, 98, or 99%) sequence identity thereto. In some embodiments, the AAV capsid protein comprises the amino acid sequence corresponding to positions 203-742, e.g., a VP3, of any one of SEQ ID NOs: 36-59, or a sequence with at least 70% (e.g., at least about 80, 85, 90, 95, 96, 97, 98, or 99%) sequence identity thereto. In some embodiments, the AAV capsid variant comprises the amino acid sequence corresponding to positions 1-742, e.g., a VP1, of any one of SEQ ID NOs: 36-59, or an amino acid sequence with at least 70% (e.g., at least about 80, 85, 90, 95, 96, 97, 98, or 99%) sequence identity thereto.

[0956] In some embodiments, an AAV capsid variant, described herein has an increased tropism for a CNS cell or tissue, e.g., a brain cell, brain tissue, spinal cord cell, or spinal cord tissue, relative to the tropism of a reference sequence comprising the amino acid sequence of SEQ ID NO: 138.

[0957] In some embodiments, an AAV capsid variant described herein transduces a brain region, e.g., a midbrain region (e.g., the hippocampus, or thalamus) or the brain stem. In some embodiments, the level of transduction is at least 5, 10, 15, 20, 25, 30, 35, 40, 45, 50, 55, 60, or 65-fold greater as compared to a reference sequence of SEQ ID NO: 138. In some embodiments, the level of transduction is at least 30, 35, 40, 45, 50, 55, 60, or 65-fold greater as compared to a reference sequence of SEQ ID NO: 138.

[0958] In some embodiments, an AAV capsid variant described herein is enriched at least about 3, 4, 5, 6, 7, 8, 9, or 10-fold in the brain compared to a reference sequence of SEQ ID NO: 138. In some embodiments, an AAV capsid variant described herein is enriched at least about 20, 25, 30, 35, 40, 45, 50, 55, 60, 65, 70, 75, 80 or 85-fold in the brain compared to a reference sequence of SEQ ID NO: 138.

[0959] In some embodiments, an AAV capsid variant described herein is enriched in the brain of at least two to three species, e.g., a non-human primate and rodent (e.g., mouse) species, compared to a reference sequence of SEQ ID NO: 138. In some embodiments, an AAV capsid variant described herein is enriched at least about 10, 15, 20, 25, 30, 35, 40, 45, 50, 55, 60, 65, 70, 75, 80, 85, 90, 95, or 100-fold in the brain of at least two to three species, e.g., a non-human primate and rodent (e.g., mouse) species, compared to a reference sequence of SEQ ID NO: 138. In some embodiments, the at least two to three species are Macaca fascicularis, Chlorocebus sabaeus, Callithrix jacchus, and/or mouse (e.g., BALB/c mice, C57Bl/6 mice, and/or CD-1 outbred mice).

[0960] In some embodiments, an AAV capsid variant described herein is enriched at least about 2, 2.5, 3, 3.5, 4, 4.5, 5, 5.5, 6, 6.5, 7, 7.5, or 8-fold, in the brain compared to a reference sequence of SEQ ID NO: 981. In some embodiments, an AAV capsid variant described herein is enriched about 2, 2.5, 3, 3.5, 4, 4.5, 5, or 5.5-fold, in the brain compared to a reference sequence of SEQ ID NO: 982.

[0961] In some embodiments, an AAV capsid variant described herein delivers an increased level of viral genomes to a brain region. In some embodiments, the level of viral genomes is increased by at least 20, 25, 30, 35, 40, 45, or 50-fold, as compared to a reference sequence of SEQ ID NO: 138. In some embodiments, the brain region comprises a midbrain region (e.g., the hippocampus or thalamus) and/or the brainstem.

[0962] In some embodiments, an AAV capsid variant described herein delivers an increased level of a payload to a brain region. In some embodiments, the level of the payload is increased by at least 20, 25, 30, 35, 40, 45, 50, 55, 60, 65, or 70-fold, as compared to a reference sequence of SEQ ID NO: 138. In some embodiments, the brain region comprises a midbrain region (e.g., the hippocampus or thalamus) and/or the brainstem.

[0963] In some embodiments, an AAV capsid variant described herein is enriched at least about 5, 10, 15, 20, 25, 30, or 35-fold, in the spinal cord compared to a reference sequence of SEQ ID NO: 138.

[0964] In some embodiments, an AAV capsid variant described herein shows preferential transduction in a brain region relative to the transduction in the dorsal root ganglia (DRG). In some embodiments, the AAV capsid variant shows preferential transduction in a brain region relative to the transduction in the liver. In some embodiments, the AAV capsid variant shows preferential transduction in a brain region relative to the transduction in the liver and the DRG. In some embodiments, the AAV capsid variant shows preferential transduction in a brain region relative to the transduction in the heart. In some embodiments, the AAV capsid variant shows preferential transduction in a brain region relative to the transduction in the heart and DRG. In some embodiments, the AAV capsid variant shows preferential transduction in a brain region relative to the transduction in the heart, DRG, and liver.

[0965] In some embodiments, an AAV capsid variant described herein is capable of transducing non-neuronal cells, e.g., glial cells (e.g., oligodendrocytes or astrocytes). In some embodiments, the AAV capsid variant described herein is capable of transducing neuronal cells and non-neuronal cells, e.g., glial cells (e.g., oligodendrocytes or astrocytes). In some embodiments, the non-neuronal cells are glial cells, oligodendrocytes (e.g., Olig2 positive oligodendrocytes), or astrocytes (e.g., Olig2 positive astrocytes). In some embodiments, the AAV capsid variant is capable of transducing Olig2 positive cells, e.g., Olig2 positive astrocytes or Olig2 positive oligodendrocytes.

[0966] In some embodiments, an AAV capsid variant of the present disclosure has decreased tropism for the liver. In some embodiments, an AAV capsid variant comprises a modification, e.g., substitution (e.g., conservative substitution), insertion, or deletion, that results in reduced tropism (e.g., de-targeting) and/or activity in the liver. In some embodiments, the reduced tropism in the liver is compared to an otherwise similar capsid that does not comprise the modification, e.g., a wild-type capsid. In some embodiments, an AAV capsid variant described herein comprises a modification, e.g., substitution (e.g., conservative substitution), insertion, or deletion that results in one or more of the following properties: (1) reduced tropism in the liver; (2) reduced, e.g., de-targeted, expression in the liver; (3) reduced activity in the liver; and/or (4) reduced binding to galactose. In some embodiments, the reduction in any one, or all of properties (1)-(3) is compared to an otherwise similar AAV capsid variant that does not comprise the modification. Exemplary modifications are provided in WO 2018/119330; Pulicherla et al. (2011) Mol. Ther. 19(6): 1070-1078; Adachi et al. (2014) Nature Communications 5(3075), DOI: 10.1038/ncomms4075; and Bell et al. (2012) J. Virol. 86(13): 7326-33; the contents of which are hereby incorporated by reference in their entirety. In some embodiments, the AAV capsid variant comprises a modification e.g., substitution (e.g., conservative substitution), insertion, or deletion, at position N470 (e.g., N470A), D271 (e.g., D271A), N272 (e.g., N272A), Y446 (e.g., Y446A), N498 (e.g., N498Y or N4981), W503 (e.g., W503R or W503A), L620 (e.g., L620F), or a combination thereof, relative to a reference sequence numbered according to SEQ ID NO: 138. In some embodiments, the AAV capsid variant comprises one, two, three, four, five or all of an amino acid other than N at position 470 (e.g., A), an amino acid other than D at position 271 (e.g., A), an amino acid other than N at position 272 (e.g., A), an amino acid other than Y at position 446 (e.g., A), and amino acid other than N at position 498 (e.g., Y or I), and amino acid other than W at position 503 (e.g., R or A), and amino acid other than L at position 620 (e.g., F), relative to a reference sequence numbered according to SEQ ID NO: 138. In some embodiments, the AAV capsid variant comprises a modification e.g., substitution (e.g., conservative substitution), insertion, or deletion, at position N470 (e.g., N470A), D271 (e.g., D271A), N272 (e.g., N272A), Y446 (e.g., Y446A), and W503 (e.g., W503R or W503A), relative to a reference sequence numbered according to SEQ ID NO: 138. In some embodiments, the AAV capsid variant comprises a modification e.g., substitution (e.g., conservative substitution), insertion, or deletion, at N498 (e.g., N498Y) and L620 (e.g., L620F).

[0967] In some embodiments, an AAV capsid variant comprised herein comprises a modification as described in Adachi et al. (2014) Nature Communications 5(3075), DOI: 10.1038/ncomms4075, the contents of which are hereby incorporated by reference in its entirety. Exemplary modifications that alter or do not alter tissue transduction in at least the brain, liver, heart, lung, and/or kidney can be found in Supplementary Data 2 showing the AAV Barcode-Seq data obtained with AAV9-AA-VBCLib of Adachi et al. (supra), the contents of which are hereby incorporated by reference in its entirety.

[0968] In some embodiments, an AAV capsid variant, of the present disclosure is isolated, e.g., recombinant. In some embodiments, a polynucleotide encoding an AAV capsid polypeptide, e.g., an AAV capsid variant, of the present disclosure is isolated, e.g., recombinant.

Also provided herein are polynucleotide sequences encoding any of the AAV capsid variants described above and AAV particles, vectors, and cells comprising the same.

### Genetic Element

[0969] In some embodiments, an AAV particle, e.g., an AAV particle for the vectorized delivery of an antibody molecule described herein (e.g., an anti-HER2 antibody molecule), comprises a genetic element.

[0970] In some embodiments, the genetic element comprises a nucleotide sequence encoding a transgene, wherein the transgene encodes a payload, e.g., an antibody molecule (e.g., an anti-HER2 antibody molecule described herein). In some embodiments, the genetic element further comprises an inverted terminal repeat (ITR) region, a promoter, an enhancer, an intron region, an exon region, a nucleic acid encoding a transgene encoding a payload, a poly A signal region, or a combination thereof. In some embodiments, a genetic element comprises a 5′AAV ITR and/or a 3′ AAV ITR. In some embodiments, any or all components of the genetic elements can be modified or optimized to improve expression or targeting of the payload (e.g., an antibody molecule) encoded by the transgene.

### Genetic Element Component: Inverted Terminal Repeats (ITRs)

[0971] In some embodiments, the genetic element comprises an ITR region. In some embodiments, the genetic element comprises at least one ITR region and a nucleic acid encoding a transgene encoding a payload, e.g., an antibody molecule (e.g., an anti-HER2 antibody molecule). In some embodiments, the genetic element comprises two ITRs. In some embodiments, the two ITRs flank the nucleic acid encoding the transgene at the 5′ and 3′ ends. In some embodiments, the ITR functions as an origin of replication comprising recognition sites for replication. In some embodiments, the ITRs comprise sequence regions which can be complementary and symmetrically arranged. In some embodiments, the ITR incorporated into a genetic element may be comprised of naturally occurring nucleotide sequences or recombinantly derived nucleotide sequences.

[0972] In some embodiments, the ITR may be of the same AAV serotype as the capsid, e.g., a capsid protein selected from any of the AAV serotypes listed in Table 1, or a functional variant thereof. In some embodiments, the ITR may be of a different AAV serotype than the capsid protein. In some embodiments, the AAV particle comprises a genetic element comprising two ITRs wherein the two ITRs of the genetic element are of the same AAV serotype. In other embodiments, the two ITRs of a genetic element are of different AAV serotypes. In some embodiments both ITRs of the genetic element of the AAV particle are AAV2 ITRs or a functional variant thereof.

[0973] In some embodiments, the ITR may be about 100 to about 150 nucleotides in length. In some embodiments, the ITR comprises about 120-140 nucleotides in length, e.g., about 130 nucleotides in length. In some embodiments, the ITR comprises about 140-150 nucleotides in length, about 141 nucleotides in length. In some embodiments, the genetic element comprises an ITR region comprising the nucleotide sequence of any of the sequences provided in Table 7 or a nucleotide sequence with at least 70%, 75%, 80%, 85%, 90%, 95% or 99% sequence identity thereto. In some embodiments, the genetic element comprises two ITR regions comprising the nucleotide sequence of any of the sequences provided in Table 7 or a nucleotide sequence with at least 70%, 75%, 80%, 85%, 90%, 95% or 99% sequence identity thereto, wherein the first and second ITR comprise the same sequence or wherein the first and second ITR comprise different sequences.

TABLE 7
Inverted Terminal Repeat (ITR) Sequence Regions

| Sequence | | SEQ | |
|---|---|---|---|
| Region | | ID | |
| Name | Length | NO | Sequence |
| ITR1 | 130 | 6559 | ctgcgcgctcgctcgctcactgagg |
| | | | ccgcccgggcaaagcccgggcgtcg |
| | | | ggcgacctttggtcgcccggcctca |
| | | | gtgagcgagcgagcgcgcagagagg |
| | | | gagtggccaactccatcactagggg |
| | | | ttcct |
| ITR2 | 141 | 6560 | cctgcaggcagctgcgcgctcgctc |
| | | | gctcactgaggccgcccgggcaaag |
| | | | cccgggcgtcgggcgacctttggtc |
| | | | gcccggcctcagtgagcgagcgagc |
| | | | gcgcagagagggagtggccaactcc |
| | | | atcactaggggttcct |
| ITR3 | 130 | 6561 | aggaacccctagtgatggagttggc |
| | | | cactccctctctgcgcgctcgctcg |
| | | | ctcactgaggccgggcgaccaaagg |
| | | | tcgcccgacgcccgggctttgcccg |
| | | | ggcggcctcagtgagcgagcgagcg |
| | | | cgcag |
| ITR4 | 141 | 6562 | aggaacccctagtgatggagttggc |
| | | | cactccctctctgcgcgctcgctcg |
| | | | ctcactgaggccgggcgaccaaagg |
| | | | tcgcccgacgcccgggctttgcccg |
| | | | ggcggcctcagtgagcgagcgagcg |
| | | | cgcagctgcctgcagg |

[0974] In some embodiment, the genetic element comprises an ITR provided in Table 7. In some embodiments, the genetic element comprises an ITR chosen from any one of ITR1-ITR4 or a functional variant thereof. In some embodiments, the genetic element comprises ITR1. In some embodiments, the genetic element comprises ITR1. In some embodiments, the ITR comprises the nucleotide sequence of any one of SEQ ID NOs: 6559-6562 as provided in Table 7, or a sequence with at least 70%, 75%, 80%, 85%, 90%, 95% or 99% sequence identity thereto. In some embodiments, the ITR comprises the nucleotide sequence of SEQ ID NO: 6559 or a nucleotide sequence with at least 70%, 75%, 80%, 85%, 90%, 95% or 99% sequence identity thereto. In some embodiments, the ITR comprises the nucleotide sequence of SEQ ID NO: 6561 or a nucleotide sequence with at least 70%, 75%, 80%, 85%, 90%, 95% or 99% sequence identity thereto.

[0975] In some embodiments, the genetic element comprises ITR1 and ITR2. In some embodiments, the genetic element comprises ITR1 at the 5′ end and ITR2 at the 3′ end. In some embodiments, the genetic element comprises an ITR, e.g., a 5′ ITR, comprising the nucleotide sequence of SEQ ID NO: 6559 or a sequence with at least with at least 70%, 75%, 80%, 85%, 90%, 95% or 99% sequence identity thereto; and an ITR, e.g., a 3′ ITR, comprising the nucleotide sequence of SEQ ID NO: 6561 or a nucleotide sequence at least 70%, 75%, 80%, 85%, 90%, 95% or 99% sequence identity thereto.

### Genetic Element Component: Promoters

[0976] In some embodiments, the genetic element comprises an element to enhance the transgene target specificity and/or expression (See e.g., Powell et al. Viral Expression Cassette Elements to Enhance Transgene Target Specificity and Expression in Gene Therapy, 2015; the contents of which are herein incorporated by reference in its entirety). In some embodiments, an element to enhance the transgene target specificity and/or expression comprise a promoter, an enhancer, e.g., a CMV enhancer, or both. In some embodiments, the genetic element comprises a promoter operably linked to a transgene encoded by a nucleic acid molecule encoding a payload, e.g., antibody molecule (e.g., an anti-HER2 antibody molecule). In some embodiments, the genetic element comprises an enhancer, e.g., a CMV enhancer. In some embodiment, the genetic element comprises at least two promoters.

[0977] In some embodiments, the genetic element comprises a promoter that is species specific, inducible, tissue-specific, and/or cell cycle-specific (e.g., as described in Parr et al., Nat. Med. 3:1145-9 (1997); the contents of which are herein incorporated by reference in their entirety). In some embodiments, the genetic element comprises a promoter that is sufficient for expression, e.g., in a target cell, of a payload (e.g., an antibody molecule, e.g., an anti-HER2 molecule) encoded by a transgene.

[0978] In some embodiments, the promoter may be a naturally occurring promoter, or a non-naturally occurring promoter. In some embodiments, the promoter is from a naturally expressed protein. In some embodiments, the promoter is an engineered promoter. In some embodiments, the promoter comprises a viral promoter, plant promoter, and/or a mammalian promoter. In some embodiments, the promoter may be a human promoter. In some embodiments, the promoter may be truncated. In some embodiments, the promoter is not a cell specific promoter.

[0979] In some embodiments, the genetic element comprises a promoter that results in expression in one or more, e.g., multiple, cells and/or tissues, e.g., a ubiquitous promoter. In some embodiments, a promoter that results in expression in one or more tissues includes but is not limited to a human elongation factor 1α-subunit (EF1α) promoter, a cytomegalovirus (CMV) immediate-early enhancer and/or promoter, a chicken β-actin (CBA) promoter and its derivative CAG, a β glucuronidase (GUSB) promoter, or ubiquitin C (UBC) promoter. In some embodiments, a tissue-specific expression elements can be used to restrict expression to certain cell types such as, but not limited to, muscle specific promoters, B cell promoters, monocyte promoters, leukocyte promoters, macrophage promoters, pancreatic acinar cell promoters, endothelial cell promoters, lung tissue promoters, astrocyte promoters, or nervous system promoters which can be used to restrict expression to neurons, astrocytes, or oligodendrocytes. In some embodiments, the genetic element comprises a ubiquitous promoter as described in Yu et al. (Molecular Pain 2011, 7:63), Soderblom et al. (E. Neuro 2015), Gill et al., (Gene Therapy 2001, Vol. 8, 1539-1546), and Husain et al. (Gene Therapy 2009), each of which are incorporated by reference in their entirety. In some embodiments, the genetic element comprises a ubiquitous promoter chosen from CMV, CBA (including derivatives CAG, CB6, CBh, etc.), EF-1α, PGK, UBC, GUSB (hGBp), or UCOE (promoter of HNRPA2B1-CBX3).

[0980] In some embodiments, the genetic element comprises a muscle-specific promoter, e.g., a promoter that results in expression in a muscle cell. In some embodiments, a muscle-specific promoter includes but is not limited to a mammalian muscle creatine kinase (MCK) promoter, a mammalian desmin (DES) promoter, a mammalian troponin I (TNNI2) promoter, a synthetic C5-12 promoter, and a mammalian skeletal alpha-actin (ASKA) promoter (see, e.g. U.S. Patent Publication US20110212529, the contents of which are herein incorporated by reference in their entirety).

[0981] In some embodiments, the genetic element comprises a nervous system specific promoter, e.g., a promoter that results in expression of a payload in a neuron, an astrocyte, and/or an oligodendrocyte. In some embodiments, a nervous system specific promoter that results in expression in neurons includes but is not limited to a neuron-specific enolase (NSE) promoter, a platelet-derived growth factor (PDGF) promoter, a platelet-derived growth factor B-chain (PDGF-β) promoter, a synapsin (Syn) promoter, a methyl-CpG binding protein 2 (MeCP2) promoter, a Ca²⁺/calmodulin-dependent protein kinase II (CaMKII) promoter, a metabotropic glutamate receptor 2 (mGluR2) promoter, a neurofilament light (NFL) or heavy (NFH) promoter, a β-globin minigene nβ2 promoter, a preproenkephalin (PPE) promoter, a enkephalin (Enk) promoter, and an excitatory amino acid transporter 2 (EAAT2) promoter. In some embodiments, a nervous system specific promoter that results in expression in astrocytes includes but is not limited to a glial fibrillary acidic protein (GFAP) promoter and an EAAT2 promoter. In some embodiments, a nervous system specific promoter that results in expression in oligodendrocytes includes but is not limited to a myelin basic protein (MBP) promoter. In some embodiments, the genetic element comprises a nervous system specific promoter as described in Husain et al. (Gene Therapy 2009), Passini and Wolfe (J. Virol. 2001, 12382-12392), Xu et al. (Gene Therapy 2001, 8, 1323-1332), Drews et al. (Mamm Genome (2007) 18:723-731), and Raymond et al. (Journal of Biological Chemistry (2004) 279(44) 46234-46241), each of which are incorporated by reference in their entirety.

[0982] In some embodiments, the genetic element comprises a liver promoter, e.g. a promoter that results in expression a liver cell. In some embodiments, the liver promoter is chosen from human α-1-antitrypsin (hAAT) or thyroxine binding globulin (TBG). In some embodiments, the genetic element comprises an RNA pol III promoter. In some embodiments, the RNA pol III promoter is chosen from U6 or H1. In some embodiments, the genetic element comprises an endothelial cell promoter, e.g., a promoter that results in expression in an endothelial cell. In some embodiments, the endothelial cell promoter is an intercellular adhesion molecule 2 (ICAM2) promoter.

[0983] In some embodiments, the genetic element comprises a promoter chosen from a CAG promoter, a CBA promoter (e.g., a minimal CBA promoter), a CB promoter, a CMV(IE) promoter and/or enhancer, a GFAP promoter, a synapsin promoter, an ICAM2 promoter, or a functional variant thereof. In some embodiments, the genetic element comprises a CAG promoter, a CMVie enhancer, and a minimal CBA promoter. In some embodiments, the genetic element comprises a CMV(IE) promoter and a CB promoter.

[0984] In some embodiments, the CAG promoter comprises the nucleotide sequence of SEQ ID NO: 6563 or nucleotide sequence with at least 70%, 75%, 80%, 85%, 90%, 95%, or 99% sequence identity thereto. In some embodiments, the CBA promoter (e.g., a minimal CBA promoter) comprises the nucleotide sequence of SEQ ID NO: 6565 or nucleotide sequence with at least 70%, 75%, 80%, 85%, 90%, 95%, or 99% sequence identity thereto. In some embodiments, the CB promoter comprises the nucleotide sequence of SEQ ID NO: 6566 or nucleotide sequence with at least 70%, 75%, 80%, 85%, 90%, 95%, or 99% sequence identity thereto. In some embodiments, the GFAP promoter comprises the nucleotide sequence of SEQ ID NO: 6568 or nucleotide sequence with at least 70%, 75%, 80%, 85%, 90%, 95%, or 99% sequence identity thereto. In some embodiments, the synapsin promoter comprises the nucleotide sequence of SEQ ID NO: 6569 or nucleotide sequence with at least 70%, 75%, 80%, 85%, 90%, 95%, or 99% sequence identity thereto. In some embodiments, the CMV(IE) promoter comprises the nucleotide sequence of SEQ ID NO: 6594 or nucleotide sequence with at least 70%, 75%, 80%, 85%, 90%, 95%, or 99% sequence identity thereto. In some embodiments, the CMV(ie) enhancer comprises the nucleotide sequence of SEQ ID NO: 6564 or nucleotide sequence with at least 70%, 75%, 80%, 85%, 90%, 95%, or 99% sequence identity thereto.

[0985] In some embodiments, the genetic element comprises a promoter provided in Table 8. In some embodiments, the promoter is chosen from any one of Promoter 1-Promoter 12, or a functional variant thereof. In some embodiments, the promoter comprises the nucleotide sequence of any one of SEQ ID NOs: 6563-6572, or 6593-6594, or a sequence with at least 70%, 75%, 80%, 85%, 90%, 95% or 99% sequence identity thereto. In some embodiments, the promoter comprises the nucleotide sequence of SEQ ID NO: 6563 or a sequence with at least 70%, 75%, 80%, 85%, 90%, 95% or 99% sequence identity thereto. In some embodiments, the promoter comprises the nucleotide sequence of SEQ ID NO: 6564, or a sequence with at least 70%, 75%, 80%, 85%, 90%, 95% or 99% sequence identity thereto. In some embodiments, the promoter comprises the nucleotide sequence of SEQ ID NO: 6565, or a sequence with at least 70%, 75%, 80%, 85%, 90%, 95% or 99% sequence identity thereto. In some embodiments, the promoter comprises the nucleotide sequence of SEQ ID NO: 6566, or a sequence with at least 70%, 75%, 80%, 85%, 90%, 95% or 99% sequence identity thereto. In some embodiments, the promoter comprises the nucleotide sequence of SEQ ID NO: 6568, or a sequence with at least 70%, 75%, 80%, 85%, 90%, 95% or 99% sequence identity thereto. In some embodiments, the promoter comprises the nucleotide sequence of SEQ ID NO: 6569, or a sequence with at least 70%, 75%, 80%, 85%, 90%, 95% or 99% sequence identity thereto. In some embodiments, the promoter comprises the nucleotide sequence of SEQ ID NO: 6594, or a sequence with at least 70%, 75%, 80%, 85%, 90%, 95% or 99% sequence identity thereto. In some embodiments, the promoter comprises the nucleotide sequence of SEQ ID NO: 4599, or a sequence with at least 70%, 75%, 80%, 85%, 90%, 95% or 99% sequence identity thereto.

TABLE 8
Promoter Sequence Regions

| | SEQ | |
|---|---|---|
| | ID | Promoter Sequence Regions |
| Name | NO | Sequence |
| Promoter 1 | 6563 | CTAGTTATTAATAGTAATCAATTACGGGGTCATTAGTTCATAGCCCATATATGGAGTTCC |
| | | GCGTTACATAACTTACGGTAAATGGCCCGCCTGGCTGACCGCCCAACGACCCCCGCCCAT |
| | | TGACGTCAATAATGACGTATGTTCCCATAGTAACGCCAATAGGGACTTTCCATTGACGTC |
| | | AATGGGTGGAGTATTTACGGTAAACTGCCCACTTGGCAGTACATCAAGTGTATCATATGC |
| | | CAAGTACGCCCCCTATTGACGTCAATGACGGTAAATGGCCCGCCTGGCATTATGCCCAGT |
| | | ACATGACCTTATGGGACTTTCCTACTTGGCAGTACATCTACGTATTAGTCATCGCTATTA |
| | | CCATGGTCGAGGTGAGCCCCACGTTCTGCTTCACTCTCCCCATCTCCCCCCCCTCCCCAC |
| | | CCCCAATTTTGTATTTATTTATTTTTTAATTATTTTGTGCAGCGATGGGGGCGGGGGGGG |
| | | GGGGGGGGCGCGCGCCAGGCGGGGCGGGGCGGGGCGAGGGGCGGGGCGGGGCGAGGCGGA |
| | | GAGGTGCGGCGGCAGCCAATCAGAGCGGCGCGCTCCGAAAGTTTCCTTTTATGGCGAGGC |
| | | GGCGGCGGCGGCGGCCCTATAAAAAGCGAAGCGCGCGGCGGGCGGGAGTCGCTGCGCGCT |
| | | GCCTTCGCCCCGTGCCCCGCTCCGCCGCCGCCTCGCGCCGCCCGCCCCGGCTCTGACTGA |
| | | CCGCGTTACTCCCACAGGTGAGCGGGCGGGACGGCCCTTCTCCTCCGGGCTGTAATTAGC |
| | | GCTTGGTTTAATGACGGCTTGTTTCTTTTCTGTGGCTGCGTGAAAGCCTTGAGGGGCTCC |
| | | GGGAGGGCCCTTTGTGCGGGGGGAGCGGCTCGGGGGGTGCGTGCGTGTGTGTGTGCGTGG |
| | | GGAGCGCCGCGTGCGGCTCCGCGCTGCCCGGCGGCTGTGAGCGCTGCGGGCGCGGCGCGG |
| | | GGCTTTGTGCGCTCCGCAGTGTGCGCGAGGGGAGCGCGGCCGGGGGCGGTGCCCCGCGGT |
| | | GCGGGGGGGGCTGCGAGGGGAACAAAGGCTGCGTGCGGGGTGTGTGCGTGGGGGGGTGAG |
| | | CAGGGGGTGTGGGCGCGTCGGTCGGGCTGCAACCCCCCCTGCACCCCCCTCCCCGAGTTG |
| | | CTGAGCACGGCCCGGCTTCGGGTGCGGGGCTCCGTACGGGGCGTGGCGCGGGGCTCGCCG |
| | | TGCCGGGCGGGGGGTGGCGGCAGGTGGGGGTGCCGGGGGGGGGGGGGCCGCCTCGGGCCG |
| | | GGGAGGGCTCGGGGGAGGGGCGCGGCGGCCCCCGGAGCGCCGGCGGCTGTCGAGGCGCGG |
| | | CGAGCCGCAGCCATTGCCTTTTATGGTAATCGTGCGAGAGGGCGCAGGGACTTCCTTTGT |
| | | CCCAAATCTGTGCGGAGCCGAAATCTGGGAGGCGCCGCCGCACCCCCTCTAGCGGGCGCG |
| | | GGGCGAAGCGGTGCGGCGCCGGCAGGAAGGAAATGGGGGGGGAGGGCCTTCGTGCGTCGC |
| | | CGCGCCGCCGTCCCCTTCTCCCTCTCCAGCCTCGGGGCTGTCCGCGGGGGGACGGCTGCC |
| | | TTCGGGGGGGACGGGGCAGGGCGGGGTTCGGCTTCTGGCGTGTGACCGGCGGCTCTAGAG |
| | | CCTCTGCTAACCATGTTCATGCCTTCTTCTTTTTCCTACAGCTCCTGGGCAACGTGCTGG |
| | | TTATTGTGCTGTCTCATCATTTTGGCAAAGAATTC |
| Promoter 2 | 6564 | TAGCCCATATATGGAGTTCCGCGTTACATAACTTACGGTAAATGGCCCGCCTGGCTGACC |
| | | GCCCAACGACCCCCGCCCATTGACGTCAATAATGACGTATGTTCCCATAGTAACGCCAAT |
| | | AGGGACTTTCCATTGACGTCAATGGGTGGAGTATTTACGGTAAACTGCCCACTTGGCAGT |
| | | ACATCAAGTGTATCATATGCCAAGTACGCCCCCTATTGACGTCAATGACGGTAAATGGCC |
| | | CGCCTGGCATTATGCCCAGTACATGACCTTATGGGACTTTCCTACTTGGCAGTACATCT |
| Promoter 3 | 6565 | CATGGTCGAGGTGAGCCCCACGTTCTGCTTCACTCTCCCCATCTCCCCCCCCTCCCCACC |
| | | CCCAATTTTGTATTTATTTATTTTTTAATTATTTTGTGCAGCGATGGGGGCGGGGGGGGG |
| | | GGGGGGGCGCGCGCCAGGCGGGGCGGGGCGGGGCGAGGGGCGGGGCGGGGCGAGGCGGAG |
| | | AGGTGCGGCGGCAGCCAATCAGAGCGGCGCGCTCCGAAAGTTTCCTTTTATGGCGAGGCG |
| | | GCGGCGGCGGCGGCCCTATAAAAAGCGAAGCGCGCGGCGGGCG |
| Promoter 4 | 6566 | CCACGTTCTGCTTCACTCTCCCCATCTCCCCCCCCTCCCCACCCCCAATTTTGTATTTAT |
| | | TTATTTTTTAATTATTTTGTGCAGCGATGGGGGCGGGGGGGGGGGGCGCGCGCCAGGCGG |
| | | GGCGGGGCGGGGCGAGGGGGGGGGCGGGGCGAGGCGGAGAGGTGCGGCGGCAGCCAATCA |
| | | GAGCGGCGCGCTCCGAAAGTTTCCTTTTATGGCGAGGCGGCGGCGGCGGCGGCCCTATAA |
| | | AAAGCGAAGCGCGCGGCGGG |
| Promoter 5 | 6567 | CGACATTGATTATTGACTAGTTATTAATAGTAATCAATTACGGGGTCATTAGTTCATAGC |
| | | CCATATATGGAGTTCCGCGTTACATAACTTACGGTAAATGGCCCGCCTGGCTGACCGCCC |
| | | AACGACCCCCGCCCATTGACGTCAATAATGACGTATGTTCCCATAGTAACGCCAATAGGG |
| | | ACTTTCCATTGACGTCAATGGGTGGAGTATTTACGGTAAACTGCCCACTTGGCAGTACAT |
| | | CAAGTGTATCATATGCCAAGTACGCCCCCTATTGACGTCAATGACGGTAAATGGCCCGCC |
| | | TGGCATTATGCCCAGTACATGACCTTATGGGACTTTCCTACTTGGCAGTACATCTACGTA |
| | | TTAGTCATCGCTATTACCATGTCGAGGCCACGTTCTGCTTCACTCTCCCCATCTCCCCCC |
| | | CCTCCCCACCCCCAATTTTGTATTTATTTATTTTTTAATTATTTTGTGCAGCGATGGGGG |
| | | CGGGGGGGGGGGGCGCGCGCCAGGCGGGGCGGGGCGGGGCGAGGGGCGGGGCGGGGCGAG |
| | | GCGGAGAGGTGCGGCGGCAGCCAATCAGAGCGGCGCGCTCCGAAAGTTTCCTTTTATGGC |
| | | GAGGCGGCGGCGGCGGCGGCCCTATAAAAAGCGAAGCGCGCGGCGGGCGGGAGC |
| Promoter 6 | 6568 | GATCTAACATATCCTGGTGTGGAGTAGCGGACGCTGCTATGACAGAGGCTCGGGGGCCTG |
| | | AGCTGGCTCTGTGAGCTGGGGAGGAGGCAGACAGCCAGGCCTTGTCTGCAAGCAGACCTG |
| | | GCAGCATTGGGCTGGCCGCCCCCCAGGGCCTCCTCTTCATGCCCAGTGAATGACTCACCT |
| | | TGGCACAGACACAATGTTCGGGGTGGGCACAGTGCCTGCTTCCCGCCGCACCCCAGCCCC |
| | | CCTCAAATGCCTTCCGAGAAGCCCATTGAGCAGGGGGCTTGCATTGCACCCCAGCCTGAC |
| | | AGCCTGGCATCTTGGGATAAAAGCAGCACAGCCCCCTAGGGGCTGCCCTTGCTGTGTGGC |
| | | GCCACCGGCGGTGGAGAACAAGGCTCTATTCAGCCTGTGCCCAGGAAAGGGGATCAGGGG |
| | | ATGCCCAGGCATGGACAGTGGGTGGCAGGGGGGGAGAGGAGGGCTGTCTGCTTCCCAGAA |
| | | GTCCAAGGACACAAATGGGTGAGGGGAGAGCTCTCCCCATAGCTGGGCTGCGGCCCAACC |
| | | CCACCCCCTCAGGCTATGCCAGGGGGTGTTGCCAGGGGCACCCGGGCATCGCCAGTCTAG |
| | | CCCACTCCTTCATAAAGCCCTCGCATCCCAGGAGCGAGCAGAGCCAGAGCAGGTTGGAGA |
| | | GGAGACGCATCACCTCCGCTGCTCGCGGGGATCCTCTAG |
| Promoter 7 | 6569 | TAGTATCTGCAGAGGGCCCTGCGTATGAGTGCAAGTGGGTTTTAGGACCAGGATGAGGCG |
| | | GGGTGGGGGTGCCTACCTGACGACCGACCCCGACCCACTGGACAAGCACCCAACCCCCAT |
| | | TCCCCAAATTGCGCATCCCCTATCAGAGAGGGGGAGGGGAAACAGGATGCGGCGAGGCGC |
| | | GTGCGCACTGCCAGCTTCAGCACCGCGGACAGTGCCTTCGCCCCCGCCTGGCGGCGCGCG |
| | | CCACCGCCGCCTCAGCACTGAAGGCGCGCTGACGTCACTCGCCGGTCCCCCGCAAACTCC |
| | | CCTTCCCGGCCACCTTGGTCGCGTCCGCGCCGCCGCCGGCCCAGCCGGACCGCACCACGC |
| | | GAGGCGCGAGATAGGGGGGCACGGGCGCGACCATCTGCGCTGCGGCGCCGGCGACTCAGC |
| | | GCTGCCTCAGTCTGCGGTGGGCAGCGGAGGAGTCGTGTCGTGCCTGAGAGCGCAGCTGTG |
| | | CTCCTGGGCACCGCGCAGTCCGCCCCCGCGGCTCCTGGCCAGACCACCCCTAGGACCCCC |
| | | TGCCCCAAGTCGCAGCC |
| Promoter 8 | 6570 | CTAGTCGACATTGATTATTGACTAGTTATTAATAGTAATCAATTACGGGGTCATTAGTTC |
| | | ATAGCCCATATATGGAGTTCCGCGTTACATAACTTACGGTAAATGGCCCGCCTGGCTGAC |
| | | CGCCCAACGACCCCCGCCCATTGACGTCAATAATGACGTATGTTCCCATAGTAACGCCAA |
| | | TAGGGACTTTCCATTGACGTCAATGGGTGGAGTATTTACGGTAAACTGCCCACTTGGCAG |
| | | TACATCAAGTGTATCATATGCCAAGTACGCCCCCTATTGACGTCAATGACGGTAAATGGC |
| | | CCGCCTGGCATTATGCCCAGTACATGACCTTATGGGACTTTCCTACTTGGCAGTACATCT |
| | | ACGTATTAGTCATCGCTATTAC |
| Promoter 9 | 6571 | CTAGTCGACATTGATTATTGACTAGTTATTAATAGTAATCAATTACGGGGTCATTAGTTC |
| | | ATAGCCCATATATGGAGTTCCGCGTTACATAACTTACGGTAAATGGCCCGCCTGGCTGAC |
| | | CGCCCAACGACCCCCGCCCATTGACGTCAATAATGACGTATGTTCCCATAGTAACGCCAA |
| | | TAGGGACTTTCCATTGACGTCAATGGGTGGAGTATTTACGGTAAACTGCCCACTTGGCAG |
| | | TACATCAAGTGTATCATATGCCAAGTACGCCCCCTATTGACGTCAATGACGGTAAATGGC |
| | | CCGCCTGGCATTATGCCCAGTACATGACCTTATGGGACTTTCCTACTTGGCAGTACATCT |
| | | ACGTATTAGTCATCGCTATTACCATGGTCGAGGTGAGCCCCACGTTCTGCTTCACTCTCC |
| | | CCATCTCCCCCCCCTCCCCACCCCCAATTTTGTATTTATTTATTTTTTAATTATTTTGTG |
| | | CAGCGATGGGGGCGGGGGGGGGGGGGGGGCGCGCGCCAGGCGGGCGGGGGCGGGGCGAGG |
| | | GGCGGGCGGGGGCGAGGCGGAGAGGTGCGGCGGCAGCCAATCAGAGCGGCGCGCTCCGAA |
| | | AGTTTCCTTTTATGGCGAGGCGGCGGCGGCGGCGGCCCTATAAAAAGCGAAGCGCGCGGC |
| | | GGGCGGGAGTCGCTGCGCGCTGCCTTCGCCCCGTGCCCCGCTCCGCCGCCGCCTCGCGCC |
| | | GCCCGCCCCGGCTCTGACTGACCGCGTTACTCCCACAGGTGAGCGGGCGGGACGGCCCTT |
| | | CTCCTCCGGGCTGTAATTAGCGCTTGGTTTAATGACGGCTTGTTTCTTTTCTGTGGCTGC |
| | | GTGAAAGCCTTGAGGGGCTCCGGGAGGGCCCTTTGTGCGGGGGGAGCGGCTCGGGGGGTG |
| | | CGTGCGTGTGTGTGTGCGTGGGGAGCGCCGCGTGCGGCTCCGCGCTGCCCGGCGGCTGTG |
| | | AGCGCTGCGGGCGCGGCGCGGGGCTTTGTGCGCTCCGCAGTGTGCGCGAGGGGAGCGCGG |
| | | CCGGGGGCGGTGCCCCGCGGTGCGGGGGGGGCTGCGAGGGGAACAAAGGCTGCGTGCGGG |
| | | GTGTGTGCGTGGGGGGGTGAGCAGGGGGTGTGGGCGCGTCGGTCGGGCTGCAACCCCCCC |
| | | TGCACCCCCCTCCCCGAGTTGCTGAGCACGGCCCGGCTTCGGGTGCGGGGCTCCGTACGG |
| | | GGCGTGGCGCGGGGCTCGCCGTGCCGGGCGGGGGGTGGCGGCAGGTGGGGGTGCCGGGCG |
| | | GGGCGGGGCCGCCTCGGGCCGGGGAGGGCTCGGGGGAGGGGCGCGGCGGCCCCCGGAGCG |
| | | CCGGCGGCTGTCGAGGCGCGGCGAGCCGCAGCCATTGCCTTTTATGGTAATCGTGCGAGA |
| | | GGGCGCAGGGACTTCCTTTGTCCCAAATCTGTGCGGAGCCGAAATCTGGGAGGCGCCGCC |
| | | GCACCCCCTCTAGCGGGCGCGGGGCGAAGCGGTGCGGCGCCGGCAGGAAGGAAATGGGCG |
| | | GGGAGGGCCTTCGTGCGTCGCCGCGCCGCCGTCCCCTTCTCCCTCTCCAGCCTCGGGGCT |
| | | GTCCGCGGGGGGACGGCTGCCTTCGGGGGGGACGGGGCAGGGCGGGGTTCGGCTTCTGGC |
| | | GTGTGACCGGCGGCTCTAGAGCCTCTGCTAACCATGTTCATGCCTTCTTCTTTTTCCTAC |
| | | AGCTCCTGGGCAACGTGCTGGTTATTGTGCTGTCTCATCATTTTGGCAAAGAATTC |
| Promoter | 6572 | CTAGTCGACATTGATTATTGACTAGTTATTAATAGTAATCAATTACGGGGTCATTAGTTC |
| 10 | | ATAGCCCATATATGGAGTTCCGCGTTACATAACTTACGGTAAATGGCCCGCCTGGCTGAC |
| | | CGCCCAACGACCCCCGCCCATTGACGTCAATAATGACGTATGTTCCCATAGTAACGCCAA |
| | | TAGGGACTTTCCATTGACGTCAATGGGTGGAGTATTTACGGTAAACTGCCCACTTGGCAG |
| | | TACATCAAGTGTATCATATGCCAAGTACGCCCCCTATTGACGTCAATGACGGTAAATGGC |
| | | CCGCCTGGCATTATGCCCAGTACATGACCTTATGGGACTTTCCTACTTGGCAGTACATCT |
| | | ACGTA |
| Promoter | 6593 | CTAGTTATTAATAGTAATCAATTACGGGGTCATTAGTTCATAGCCCATATATGGAGTTCC |
| 11 | | GCGTTACATAACTTACGGTAAATGGCCCGCCTGGCTGACCGCCCAACGACCCCCGCCCAT |
| | | TGACGTCAATAATGACGTATGTTCCCATAGTAACGCCAATAGGGACTTTCCATTGACGTC |
| | | AATGGGTGGAGTATTTACGGTAAACTGCCCACTTGGCAGTACATCAAGTGTATCATATGC |
| | | CAAGTACGCCCCCTATTGACGTCAATGACGGTAAATGGCCCGCCTGGCATTATGCCCAGT |
| | | ACATGACCTTATGGGACTTTCCTACTTGGCAGTACATCTACGTATTAGTCATCGCTATTA |
| | | CCATGGTCGAGGTGAGCCCCACGTTCTGCTTCACTCTCCCCATCTCCCCCCCCTCCCCAC |
| | | CCCCAATTTTGTATTTATTTATTTTTTAATTATTTTGTGCAGCGATGGGGGCGGGGGGGG |
| | | GGGGGGGGCGCGCGCCAGGCGGGGCGGGGCGGGGCGAGGGGCGGGGCGGGGCGAGGCGGA |
| | | GAGGTGCGGCGGCAGCCAATCAGAGCGGCGCGCTCCGAAAGTTTCCTTTTATGGCGAGGC |
| | | GGCGGCGGCGGCGGCCCTATAAAAAGCGAAGCGCGCGGCGGGCGGGAGTCGCTGCGCGCT |
| | | GCCTTCGCCCCGTGCCCCGCTCCGCCGCCGCCTCGCGCCGCCCGCCCCGGCTCTGACTGA |
| | | CCGCGTTACTCCCACAGGTGAGCGGGCGGGACGGCCCTTCTCCTCCGGGCTGTAATTAGC |
| | | GCTTGGTTTAATGACGGCTTGTTTCTTTTCTGTGGCTGCGTGAAAGCCTTGAGGGGCTCC |
| | | GGGAGGGCCCTTTGTGCGGGGGGAGCGGCTCGGGGGGTGCGTGCGTGTGTGTGTGCGTGG |
| | | GGAGCGCCGCGTGCGGCTCCGCGCTGCCCGGCGGCTGTGAGCGCTGCGGGCGCGGCGCGG |
| | | GGCTTTGTGCGCTCCGCAGTGTGCGCGAGGGGAGCGCGGCCGGGGGCGGTGCCCCGCGGT |
| | | GCGGGGGGGGCTGCGAGGGGAACAAAGGCTGCGTGCGGGGTGTGTGCGTGGGGGGGTGAG |
| | | CAGGGGGTGTGGGCGCGTCGGTCGGGCTGCAACCCCCCCTGCACCCCCCTCCCCGAGTTG |
| | | CTGAGCACGGCCCGGCTTCGGGTGCGGGGCTCCGTACGGGGCGTGGCGCGGGGCTCGCCG |
| | | TGCCGGGCGGGGGGTGGCGGCAGGTGGGGGTGCCGGGGGGGGCGGGGCCGCCTCGGGCCG |
| | | GGGAGGGCTCGGGGGAGGGGCGCGGCGGCCCCCGGAGCGCCGGCGGCTGTCGAGGCGCGG |
| | | CGAGCCGCAGCCATTGCCTTTTATGGTAATCGTGCGAGAGGGCGCAGGGACTTCCTTTGT |
| | | CCCAAATCTGTGCGGAGCCGAAATCTGGGAGGCGCCGCCGCACCCCCTCTAGCGGGCGCG |
| | | GGGCGAAGCGGTGCGGCGCCGGCAGGAAGGAAATGGGGGGGGAGGGCCTTCGTGCGTCGC |
| | | CGCGCCGCCGTCCCCTTCTCCCTCTCCAGCCTCGGGGCTGTCCGCGGGGGGACGGCTGCC |
| | | TTCGGGGGGGACGGGGCAGGGCGGGGTTCGGCTTCTGGCGTGTGACCGGCGGCTCTAGAG |
| | | CCTCTGCTAACCATGTTCATGCCTTCTTCTTTTTCCTACAGCTCCTGGGCAACGTGCTGG |
| | | TTATTGTGCTGTCTCATCATTTTGGCAAAGAATT |
| Promoter | 6594 | GACATTGATTATTGACTAGTTATTAATAGTAATCAATTACGGGGTCATTAGTTCATAGCC |
| 12 | | CATATATGGAGTTCCGCGTTACATAACTTACGGTAAATGGCCCGCCTGGCTGACCGCCCA |
| | | ACGACCCCCGCCCATTGACGTCAATAATGACGTATGTTCCCATAGTAACGCCAATAGGGA |
| | | CTTTCCATTGACGTCAATGGGTGGAGTATTTACGGTAAACTGCCCACTTGGCAGTACATC |
| | | AAGTGTATCATATGCCAAGTACGCCCCCTATTGACGTCAATGACGGTAAATGGCCCGCCT |
| | | GGCATTATGCCCAGTACATGACCTTATGGGACTTTCCTACTTGGCAGTACATCTACGTAT |
| | | TAGTCATCGCTATTACCATG |

[0986] In some embodiments, the genetic element comprises Promoter 1. In some embodiments, the genetic element comprises Promoter 2. In some embodiments, the genetic element comprises Promoter 3. In some embodiments, the genetic element comprises Promoter 4. In some embodiments, the genetic element comprises Promoter 5. In some embodiments, the genetic element comprises Promoter 6. In some embodiments, the genetic element comprises Promoter 12.

[0987] In some embodiments, the promoter of the genetic element further comprises at least one promoter sub-region. In some embodiments, the promoter comprises Promoter 1, further comprising Promoter 2 and Promoter 3 sub-regions. In some embodiments, the genetic element comprises at least 2 or more promoters. In some embodiments, the genetic element comprises Promoter 12 and Promoter 4.

### Genetic Element Component: Untranslated Regions (UTRs)

[0988] In some embodiments, the genetic element comprises an untranslated region (UTR). In some embodiments, a wild-type UTR of a gene are transcribed but not translated. In some embodiments, the 5′ UTR starts at the transcription start site and ends at the start codon and the 3′ UTR starts immediately following the stop codon and continues until the termination signal for transcription.

[0989] In some embodiments, a UTR comprises a feature found in abundantly expressed genes of specific target organs to enhance the stability and protein production. As a non-limiting example, a 5′ UTR from mRNA normally expressed in the liver (e.g., albumin, serum amyloid A, Apolipoprotein A/B/E, transferrin, alpha fetoprotein, erythropoietin, or Factor VIII) may be used in the genetic element of an AAV particle described herein to enhance expression in hepatic cell lines or liver.

[0990] In some embodiments, a genetic element comprises a 5′UTR, e.g., a wild-type (e.g., naturally occurring) 5′UTR or a recombinant (e.g., non-naturally occurring) 5′UTR. In some embodiments, a 5′ UTR comprises a feature which plays a role in translation initiation. In some embodiments, a UTR, e.g., a 5′ UTR, comprises a Kozak sequence. In some embodiments, a Kozak sequence is involved in the process by which the ribosome initiates translation of many genes. In some embodiments, a Kozak sequence has the consensus sequence of CCR(A/G)CCAUGG, where R is apurine (adenine or guanine) three bases upstream of the start codon (ATG), which is followed by another ‘G’. In some embodiments, a Kozak sequence comprises the nucleotide sequence of GAGGAGCCACC (SEQ ID NO: 4543) or a nucleotide sequence with at least 95-99% sequence identity thereto. In some embodiments, a Kozak sequence comprises the nucleotide sequence of GCCGCCACCATG (SEQ ID NO: 6589), or a nucleotide sequence with at least 95-99% sequence identity thereto. In some embodiments, a genetic element comprises a 5′UTR comprising a Kozak sequence. In some embodiments, a genetic element comprises a 5′UTR that does not comprise a Kozak sequence.

[0991] In some embodiments, the genetic element comprises a 3′UTR, e.g., a wild-type (e.g., naturally occurring) 3′UTR or a recombinant (e.g., non-naturally occurring) 3′UTR. In some embodiments, a 3′ UTR comprises an element that modulates, e.g., increases or decreases, stability of a nucleic acid. In some embodiments, a 3′ UTR comprises stretches of Adenosines and Uridines embedded therein, e.g., an AU rich signature. These AU rich signatures are generally prevalent in genes with high rates of turnover and are described, e.g., in Chen et al, 1995, the contents of which are herein incorporated by reference in its entirety. In some embodiments, an AR rich signature comprises an AU rich element (ARE). In some embodiments, a 3′UTR comprises an ARE chosen from a class I ARE (e.g., c-Myc and MyoD), a class II ARE (e.g., GM-CSF and TNF-α), a class TUI ARE (e.g., c-Jun and Myogenin), or combination thereto. Tn some embodiments, a class I ARE comprises several dispersed copies of an AUUUA motif within U-rich regions. In some embodiments, a class II ARE comprises two or more overlapping UUAUUUA(U/A)(U/A) nonamers. In some embodiments, a class III ARE comprises U rich regions and/or do not contain an AUUUA motif. In some embodiments, an ARE destabilizes the messenger.

[0992] In some embodiments, a 3′UTR comprises a binding site for a protein member of the ELAV family. In some embodiments, a 3′ UTR comprises a binding site for an HuR protein. In some embodiments, an HuR protein binds to an ARE of any one of classes I-III and/or increases the stability of mRNA. Without wishing to be bound by theory, it is believed in some embodiments, that a 3′UTR comprising an HuR specific binding sites will lead to HuR binding and, stabilization of a message in vivo.

[0993] In some embodiments, the 3′ UTR of the genetic element comprises an oligo(dT) sequence for templated addition of a poly-A tail.

[0994] In some embodiments, the genetic element comprises a miRNA seed, binding site and/or full sequence. Generally, microRNAs (or miRNA or miR) are 19-25 nucleotide noncoding RNAs that bind to the sites of nucleic acid targets and down-regulate gene expression either by reducing nucleic acid molecule stability or by inhibiting translation. In some embodiments, the microRNA sequence comprises a seed region, e.g., a sequence in the region of positions 2-8 of the mature microRNA, which sequence has perfect Watson-Crick complementarity to the miRNA target sequence of the nucleic acid. In some embodiments, the genetic element or viral genome may be engineered to include, alter or remove at least one miRNA binding site, sequence, or seed region.

[0995] In some embodiments, a UTR from any gene known in the art may be incorporated into the genetic element of an AAV particle described herein. These UTRs, or portions thereof, may be placed in the same orientation as in the gene from which they were selected, or they may be altered in orientation or location. In some embodiments, the UTR used in the genetic element of the AAV particle may be inverted, shortened, lengthened, made with one or more other 5′ UTRs or 3′ UTRs known in the art. In some embodiments, an altered UTR, comprises a UTR has been changed in some way in relation to a reference sequence. For example, a 3′ or 5′ UTR may be altered relative to a wild type or native UTR by the change in orientation or location as taught above or may be altered by the inclusion of additional nucleotides, deletion of nucleotides, swapping or transposition of nucleotides. In some embodiments, the genetic element comprises an artificial UTR, e.g., a UTR that is not a variant of a wild-type, e.g., a naturally occurring, UTR. In some embodiments, the genetic element comprises a UTR selected from a family of transcripts whose proteins share a common function, structure, feature or property.

### Genetic Element Component: miR Binding Site

[0996] Tissue- or cell-specific expression of the AAV viral particles of the invention can be enhanced by introducing tissue- or cell-specific regulatory sequences, e.g., promoters, enhancers, microRNA binding sites, e.g., a detargeting site. Without wishing to be bound by theory, it is believed that an encoded miR binding site can modulate, e.g., prevent, suppress, or otherwise inhibit, the expression of a gene of interest on the genetic element of the invention, based on the expression of the corresponding endogenous microRNA (miRNA) or a corresponding controlled exogenous miRNA in a tissue or cell, e.g., a non-targeting cell or tissue. In some embodiments, a miR binding site modulates, e.g., reduces, expression of the payload encoded by a genetic element of an AAV particle described herein in a cell or tissue where the corresponding mRNA is expressed.

[0997] In some embodiments, the genetic element of an AAV particle described herein comprises a nucleotide sequence encoding a microRNA binding site, e.g., a detargeting site. In some embodiments, the genetic element of an AAV particle described herein comprises a nucleotide sequence encoding a miR binding site, a microRNA binding site series (miR BSs), or a reverse complement thereof.

[0998] In some embodiments, the nucleotide sequence encoding the miR binding site series or the miR binding site is located in the 3′-UTR region of the genetic element (e.g., 3′ relative to the nucleotide sequence encoding a payload), e.g., before the polyA sequence, 5′-UTR region of the genetic element (e.g., 5′ relative to the nucleotide sequence encoding a payload), or both.

[0999] In some embodiments, the encoded miR binding site series comprise at least 1-5 copies, e.g., at least 1-3, 2-4, 3-5, 1, 2, 3, 4, 5 or more copies of a miR binding site (miR BS). In some embodiments, all copies are identical, e.g., comprise the same miR binding site. In some embodiments, the miR binding sites within the encoded miR binding site series are continuous and not separated by a spacer. In some embodiments, the miR binding sites within an encoded miR binding site series are separated by a spacer, e.g., a non-coding sequence. In some embodiments, the spacer is about 1 to 6 nucleotides or about 5 to 10 nucleotides, e.g., about 7-8 nucleotides, nucleotides in length. In some embodiments, the spacer coding sequence or reverse complement thereof comprises one or more of (i) GGAT; (ii) CACGTG; (iii) GCATGC, or a repeat of one or more of (i)-(iii). In some embodiments, the spacer comprises the nucleotide sequence of GATAGTTA, or a nucleotide sequence having at least one, two, or three modifications, but no more than four modifications of GATAGTTA.

[1000] In some embodiments, the encoded miR binding site series comprise at least 1-5 copies, e.g., at least 1-3, 2-4, 3-5, 1, 2, 3, 4, 5 or more copies of a miR binding site (miR BS). In some embodiments, at least 1, 2, 3, 4, 5, or all of the copies are different, e.g., comprise a different miR binding site. In some embodiments, the miR binding sites within the encoded miR binding site series are continuous and not separated by a spacer. In some embodiments, the miR binding sites within an encoded miR binding site series are separated by a spacer, e.g., a non-coding sequence. In some embodiments, the spacer is about 1 to 6 nucleotides or about 5 to 10 nucleotides, e.g., about 7-8 nucleotides, in length. In some embodiments, the spacer comprises one or more of (i) GGAT; (ii) CACGTG; (iii) GCATGC, or a repeat of one or more of (i)-(iii). In some embodiments, the spacer comprises the nucleotide sequence of GATAGTTA, or a nucleotide sequence having at least one, two, or three modifications, but no more than four modifications of GATAGTTA

[1001] In some embodiments, the encoded miR binding site is substantially identical (e.g., at least 70%, 75%, 80%, 85%, 90%, 95%, 99% or 100% identical), to the miR in the host cell. In some embodiments, the encoded miR binding site comprises at least 1, 2, 3, 4, or 5 mismatches or no more than 6, 7, 8, 9, or 10 mismatches to a miR in the host cell. In some embodiments, the mismatched nucleotides are contiguous. In some embodiments, the mismatched nucleotides are non-contiguous. In some embodiments, the mismatched nucleotides occur outside the seed region-binding sequence of the miR binding site, such as at one or both ends of the miR binding site. In some embodiments, the miR binding site is 100% identical to the miR in the host cell.

[1002] In some embodiments, the nucleotide sequence encoding the miR binding site is substantially complimentary (e.g., at least 70%, 75%, 80%, 85%, 90%, 95%, 99% or 100% complimentary), to the miR in the host cell. In some embodiments, to complementary sequence of the nucleotide sequence encoding the miR binding site comprises at least 1, 2, 3, 4, or 5 mismatches or no more than 6, 7, 8, 9, or 10 mismatches to a miR in the host cell. In some embodiments, the mismatched nucleotides are contiguous.

[1003] In some embodiments, the mismatched nucleotides are non-contiguous. In some embodiments, the mismatched nucleotides occur outside the seed region-binding sequence of the miR binding site, such as at one or both ends of the miR binding site. In some embodiments, the encoded miR binding site is 100% complimentary to the miR in the host cell.

[1004] In some embodiments, an encoded miR binding site or sequence region is at least about 10 to about 125 nucleotides in length, e.g., at least about 10 to 50 nucleotides, 10 to 100 nucleotides, 50 to 100 nucleotides, 50 to 125 nucleotides, or 100 to 125 nucleotides in length. In some embodiments, an encoded miR binding site or sequence region is at least about 7 to about 28 nucleotides in length, e.g., at least about 8-28 nucleotides, 7-28 nucleotides, 8-18 nucleotides, 12-28 nucleotides, 20-26 nucleotides, 22 nucleotides, 24 nucleotides, or 26 nucleotides in length, and optionally comprises at least one consecutive region (e.g., 7 or 8 nucleotides) complementary (e.g., fully or partially complementary) to the seed sequence of a miRNA (e.g., a miR122, a miR142, a miR183).

[1005] In some embodiments, the encoded miR binding site is complementary (e.g., fully or partially complementary) to a miR expressed in liver or hepatocytes, such as miR122. In some embodiments, the encoded miR binding site or encoded miR binding site series comprises a miR122 binding site sequence. In some embodiments, the encoded miR122 binding site comprises the nucleotide sequence of ACAAACACCATTGTCACACTCCA (SEQ ID NO: 4673), or a nucleotide sequence having at least 50%, 55%, 60%, 65%, 70%, 75%, 80%, 85%, 90%, at least 95%, at least 99%, or 100% sequence identity, or having at least one, two, three, four, five, six, or seven modifications but no more than ten modifications to SEQ ID NO: 4673, e.g., wherein the modification can result in a mismatch between the encoded miR binding site and the corresponding miRNA. In some embodiments, the viral genome comprises at least 2, 3, 4, or 5 copies of the encoded miR122 binding site, e.g., an encoded miR122 binding site series, optionally wherein the encoded miR122 binding site series comprises the nucleotide sequence of: ACAAACACCATTGTCACACTCCACACAAACACCATTGTCACACTCCACACAAACACCATTGTCACACTCC A (SEQ ID NO: 4674), or a nucleotide sequence having at least 50%, 55%, 60%, 65%, 70%, 75%, 80%, 85%, 90%, at least 95%, at least 99%, or 100% sequence identity, or having at least one, two, three, four, five, six, or seven modifications but no more than ten modifications to SEQ ID NO: 4674, e.g., wherein the modification can result in a mismatch between the encoded miR binding site and the corresponding miRNA. In some embodiments, at least two of the encoded miR122 binding sites are connected directly, e.g., without a spacer. In other embodiments, at least two of the encoded miR122 binding sites are separated by a spacer, e.g., 1, 2, 3, 4, 5, 6, 7, 8, 9, or 10 nucleotides in length, which is located between two or more consecutive encoded miR122 binding site sequences. In embodiments, the spacer is about 1 to 6 nucleotides or about 5 to 10 nucleotides, e.g., about 7-8, in length. In some embodiments, the spacer coding sequence or reverse complement thereof comprises one or more of (i) GGAT; (ii) CACGTG; (iii) GCATGC, or a repeat of one or more of (i)-(iii). In some embodiments, an encoded miR binding site series comprises at least 3-5 copies (e.g., 4 copies) of a miR122 binding site, with or without a spacer, wherein the spacer is about 1 to 6 nucleotides or about 5 to 10 nucleotides, e.g., about 7-8 nucleotides or about 8 nucleotides, in length. In some embodiments, the spacer comprises the nucleotide sequence of GATAGTTA, or a nucleotide sequence having at least one, two, or three modifications, but no more than four modifications of GATAGTTA.

[1006] In some embodiments, the encoded miR binding site is complementary (e.g., fully or partially complementary) to a miR expressed in hematopoietic lineage, including immune cells (e.g., antigen presenting cells or APC, including dendritic cells (DCs), macrophages, and B-lymphocytes). In some embodiments, the encoded miR binding site complementary to a miR expressed in hematopoietic lineage comprises a nucleotide sequence disclosed, e.g., in US 2018/0066279, the contents of which are incorporated by reference herein in its entirety.

[1007] In embodiments, the encoded miR binding site or encoded miR binding site series comprises a miR-142-3p binding site sequence. In some embodiments, the encoded miR-142-3p binding site comprises the nucleotide sequence of TCCATAAAGTAGGAAACACTACA (SEQ ID NO: 4675), a nucleotide sequence having at least 50%, 55%, 60%, 65%, 70%, 75%, 80%, 85%, 90%, at least 95%, at least 99%, or 100% sequence identity, or having at least one, two, three, four, five, six, or seven modifications but no more than ten modifications to SEQ ID NO: 4675, e.g., wherein the modification can result in a mismatch between the encoded miR binding site and the corresponding miRNA. In some embodiments, the viral genome comprises at least 2, 3, 4, or 5 copies of the encoded miR-142-3p binding site, e.g., an encoded miR-142-3p binding site series. In some embodiments, the at least 2, 3, 4, or 5 copies (e.g., 2 or 3 copies) of the encoded miR-142-3p binding site are continuous (e.g., not separated by a spacer) or separated by a spacer. In some embodiments, the spacer is about 1 to 6 nucleotides or about 5 to 10 nucleotides, e.g., about 7-8 nucleotides or about 8 nucleotides, in length. In some embodiments, the spacer sequence comprises one or more of (i) GGAT; (ii) CACGTG; (iii) GCATGC, or a repeat of one or more of (i)-(iii). In some embodiments, the spacer comprises the nucleotide sequence of GATAGTTA, or a nucleotide sequence having at least one, two, or three modifications, but no more than four modifications of GATAGTTA.

[1008] In some embodiments, the encoded miR binding site is complementary (e.g., fully or partially complementary) to a miR expressed in the heart. In embodiments, the encoded miR binding site or encoded miR binding site series comprises a miR-1 binding site. In some embodiments, the encoded miR-1 binding site comprises the nucleotide sequence of ATACATACTTCTTTACATTCCA (SEQ ID NO: 4679), a nucleotide sequence having at least 50%, 55%, 60%, 65%, 70%, 75%, 80%, 85%, 90%, at least 95%, at least 99%, or 100% sequence identity, or having at least one, two, three, four, five, six, or seven modifications, e.g., substitutions, insertions, or deletions, but no more than ten modifications, e.g., substitutions, insertions, or deletions, relative to the nucleotide sequence of SEQ ID NO: 4679, e.g., wherein the modification can result in a mismatch between the encoded miR binding site and the corresponding miRNA. In some embodiments, the genetic element comprises at least 2, 3, 4, or 5 copies of the encoded miR-1 binding site, e.g., an encoded miR-1 binding site series. In some embodiments, the at least 2, 3, 4, or 5 copies (e.g., 2 or 3 copies) of the encoded miR-1 binding site are continuous (e.g., not separated by a spacer) or separated by a spacer. In some embodiments, the spacer is about 1 to 6 nucleotides or about 5 to 10 nucleotides, e.g., about 7-8 nucleotides or about 8 nucleotides, in length. In some embodiments, the spacer sequence comprises one or more of (i) GGAT; (ii) CACGTG; (iii) GCATGC, or a repeat of one or more of (i)-(iii). In some embodiments, the spacer comprises the nucleotide sequence of GATAGTTA, or a nucleotide sequence having at least one, two, or three modifications, e.g., substitutions, insertions, or deletions, but no more than four modifications, e.g., substitutions, insertions, or deletions, relative to the nucleotide sequence of GATAGTTA.

[1009] In some embodiments, the encoded miR binding site is complementary (e.g., fully complementary or partially complementary) to a miR expressed in a DRG (dorsal root ganglion) neuron, e.g., a miR183, a miR182, and/or miR96 binding site. In some embodiments, the encoded miR binding site is complementary to a miR expressed in expressed in a DRG neuron comprises a nucleotide sequence disclosed, e.g., in WO2020/132455, the contents of which are incorporated by reference herein in its entirety.

[1010] In some embodiments, the encoded miR binding site or encoded miR binding site series comprises a miR183 binding site sequence. In some embodiments, the encoded miR183 binding site comprises the nucleotide sequence of AGTGAATTCTACCAGTGCCATA (SEQ ID NO: 4676), or a nucleotide sequence having at least 50%, 55%, 60%, 65%, 70%, 75%, 80%, 85%, 90%, at least 95%, at least 99%, or 100% sequence identity, or having at least one, two, three, four, five, six, or seven modifications but no more than ten modifications to SEQ ID NO: 4676, e.g., wherein the modification can result in a mismatch between the encoded miR binding site and the corresponding miRNA. In some embodiments, the sequence complementary to the seed sequence corresponds to the double underlined of the encoded miR-183 binding site sequence. In some embodiments, the viral genome comprises at least comprises at least 2, 3, 4, or 5 copies (e.g., at least 2 or 3 copies) of the encoded miR183 binding site, e.g. an encoded miR183 binding site. In some embodiments, the at least 2, 3, 4, or 5 copies (e.g., 2 or 3 copies) of the encoded miR183 binding site are continuous (e.g., not separated by a spacer) or separated by a spacer. In some embodiments, the spacer is about 1 to 6 nucleotides or about 5 to 10 nucleotides, e.g., about 7-8 nucleotides or about 8 nucleotides, in length. In some embodiments, the spacer comprises the nucleotide sequence of GATAGTTA, or a nucleotide sequence having at least one, two, or three modifications, but no more than four modifications of GATAGTTA. In some embodiments, the spacer sequence comprises one or more of (i) GGAT; (ii) CACGTG; (iii) GCATGC, or a repeat of one or more of (i)-(iii).

[1011] In some embodiments, the encoded miR binding site or the encoded miR binding site series comprises a miR182 binding site sequence. In some embodiments, the encoded miR182 binding site comprises, the nucleotide sequence of AGTGTGAGTTCTACCATTGCCAAA (SEQ ID NO: 4677), a sequence having at least 50%, 55%, 60%, 65%, 70%, 75%, 80%, 85%, 90%, at least 95%, at least 99%, or 100% sequence identity, or having at least one, two, three, four, five, six, or seven modifications but no more than ten modifications to SEQ ID NO: 4677, e.g., wherein the modification can result in a mismatch between the encoded miR binding site and the corresponding miRNA. In some embodiments, the viral genome comprises at least 2, 3, 4, or 5 copies of the encoded miR182 binding site, e.g., an encoded miR182 binding site series. In some embodiments, the at least 2, 3, 4, or 5 copies (e.g., 2 or 3 copies) of the encoded miR182 binding site are continuous (e.g., not separated by a spacer) or separated by a spacer. In some embodiments, the spacer is about 1 to 6 nucleotides or about 5 to 10 nucleotides, e.g., about 7-8 nucleotides or about 8 nucleotides, in length. In some embodiments, the spacer comprises the nucleotide sequence of GATAGTTA, or a nucleotide sequence having at least one, two, or three modifications, but no more than four modifications of GATAGTTA. In some embodiments, the spacer sequence comprises one or more of (i) GGAT; (ii) CACGTG; (iii) GCATGC, or a repeat of one or more of (i)-(iii).

[1012] In certain embodiments, the encoded miR binding site or the encoded miR binding site series comprises a miR96 binding site sequence. In some embodiments, the encoded miR96 binding site comprises the nucleotide sequence of AGCAAAAATGTGCTAGTGCCAAA (SEQ ID NO: 4678), a sequence having at least 50%, 55%, 60%, 65%, 70%, 75%, 80%, 85%, 90%, at least 95%, at least 99%, or 100% sequence identity, or having at least one, two, three, four, five, six, or seven modifications but no more than ten modifications to SEQ ID NO: 4678, e.g., wherein the modification can result in a mismatch between the encoded miR binding site and the corresponding miRNA. In some embodiments, the viral genome comprises at least 2, 3, 4, or 5 copies of the encoded miR96 binding site, e.g., an encoded miR96 binding site series. In some embodiments, the at least 2, 3, 4, or 5 copies (e.g., 2 or 3 copies) of the encoded miR96 binding site are continuous (e.g., not separated by a spacer) or separated by a spacer. In some embodiments, the spacer is about 1 to 6 nucleotides or about 5 to 10 nucleotides, e.g., about 7-8 nucleotides or about 8 nucleotides, in length. In some embodiments, the spacer comprises the nucleotide sequence of GATAGTTA, or a nucleotide sequence having at least one, two, or three modifications, but no more than four modifications of GATAGTTA. In some embodiments, the spacer sequence comprises one or more of (i) GGAT; (ii) CACGTG; (iii) GCATGC, or a repeat of one or more of (i)-(iii).

[1013] In some embodiments, the encoded miR binding site series comprises a miR122 binding site, a miR142 binding site, a miR183 binding site, a miR182 binding site, a miR 96 binding site, a mir-1 binding site, or a combination thereof. In some embodiments, the encoded miR binding site series comprises at least 2, 3, 4, or 5 copies of a miR122 binding site, a miR142 binding site, a miR183 binding site, a miR182 binding site, a miR 96 binding site, or a combination thereof. In some embodiments, at least two of the encoded miR binding sites are connected directly, e.g., without a spacer. In other embodiments, at least two of the encoded miR binding sites are separated by a spacer, e.g., 1, 2, 3, 4, 5, 6, 7, 8, 9, or 10 nucleotides in length, which is located between two or more consecutive encoded miR binding site sequences. In embodiments, the spacer is at least about 5 to 10 nucleotides, e.g., about 7-8 nucleotides or about 8 nucleotides, in length. In some embodiments, the spacer coding sequence or reverse complement thereof comprises one or more of (i) GGAT; (ii) CACGTG; (iii) GCATGC, or a repeat of one or more of (i)-(iii). In some embodiments, the spacer comprises the nucleotide sequence of GATAGTTA, or a nucleotide sequence having at least one, two, or three modifications, but no more than four modifications of GATAGTTA.

[1014] In some embodiments, an encoded miR binding site series comprises at least 2-5 copies (e.g., 2 or 3 copies) of a combination of at least two, three, four, five, or all of a miR122 binding site, a miR142 binding site, a miR183 binding site, a miR182 binding site, a miR96 binding site, and/or a mir-1 binding site, wherein each of the miR binding sites within the series are continuous (e.g., not separated by a spacer) or are separated by a spacer. In some embodiments, the spacer is about 1 to 6 nucleotides or about 5 to 10 nucleotides, e.g., about 7-8 nucleotides or about 8 nucleotides, in length. In some embodiments, the spacer sequence comprises one or more of (i) GGAT; (ii) CACGTG; (iii) GCATGC, or a repeat of one or more of (i)-(iii). In some embodiments, the spacer comprises the nucleotide sequence of GATAGTTA, or a nucleotide sequence having at least one, two, or three modifications, but no more than four modifications of GATAGTTA.

### Genetic Element Component: Polyadenylation Sequence

[1015] In some embodiments, the genetic element of the AAV particles of the present disclosure comprise a polyadenylation sequence. In some embodiments, the genetic element comprises a polyadenylation (referred to herein as poly A, polyA, or poly-A) sequence between the 3′ end of the transgene encoding the payload and the 5′ end of the 3′ITR. In some embodiments, the genetic element comprises two or more polyA sequences. In some embodiments, the genetic element does not comprise a polyA sequence.

[1016] In some embodiments, the genetic element comprises a rabbit globin polyA signal region. In some embodiments, the rabbit globin polyA signal region comprises the nucleotide sequence of SEQ ID NO: 6590, or a nucleotide sequence with at least 70%, 75%, 80%, 85%, 90%, 95%, or 99% sequence identity thereto.

TABLE 13
PolyA Signal Sequence Regions

| | SEQ ID | |
|---|---|---|
| Name | NO | Sequence |
| PolyA1 | 6590 | GATCTTTTTCCCTCTGCCAAAAATTATGGGGACATCATGAAGCCCCTTGAGCATCTGA |
| | | CTTCTGGCTAATAAAGGAAATTTATTTTCATTGCAATAGTGTGTTGGAATTTTTTGTG |
| | | TCTCTCACTCG |
| PolyA2 | 6591 | GGGTGGCATCCCTGTGACCCCTCCCCAGTGCCTCTCCTGGCCCTGGAAGTTGCCACTC |
| | | CAGTGCCCACCAGCCTTGTCCTAATAAAATTAAGTTGCATCATTTTGTCTGACTAGGT |
| | | GTCCTTCTATAATATTATGGGGTGGAGGGGGGTGGTATGGAGCAAGGGGCAAGITGGG |
| | | AAGACAACCTGTAGGGCCTGCGGGGTCTATTGGGAACCAAGCTGGAGTGCAGTGGCAC |
| | | AATCTTGGCTCACTGCAATCTCCGCCTCCTGGGTTCAAGCGATTCTCCTGCCTCAGCC |
| | | TCCCGAGTTGTTGGGATTCCAGGCATGCATGACCAGGCTCAGCTAATTTTTGTTTTTT |
| | | TGGTAGAGACGGGGTTTCACCATATTGGCCAGGCTGGTCTCCAACTCCTAATCTCAGG |
| | | TGATCTACCCACCTTGGCCTCCCAAATTGCTGGGATTACAGGCGTGAACCACTGCTCC |
| | | CTTCCCTGTCCTT |
| PolyA3 | 6592 | GAATTCACTCCTCAGGTGCAGGCTGCCTATCAGAAGGTGGTGGCTGGTGTGGCCAATG |
| | | CCCTGGCTCACAAATACCACTGAGATCTTTTTCCCTCTGCCAAAAATTATGGGGACAT |
| | | CATGAAGCCCCTTGAGCATCTGACTTCTGGCTAATAAAGGAAATTTATTTTCATTGCA |
| | | ATAGTGTGTTGGAATTTTTTGTGTCTCTCACTCGGAAGGACATATGGGAGGGCAAATC |
| | | ATTTAAAACATCAGAATGAGTATTTGGTTTAGAGTTTGGCAACATATGCCCATATGCT |
| | | GGCTGCCATGAACAAAGGTTGGCTATAAAGAGGTCATCAGTATATGAAACAGCCCCCT |
| | | GCTGTCCATTCCTTATTCCATAGAAAAGCCTTGACTTGAGGTTAGATTTTTTTTATAT |
| | | TTTGTTTTGTGTTATTTTTTTCTTTAACATCCCTAAAATTTTCCTTACATGTTTTACT |
| | | AGCCAGATTTTTCCTCCTCTCCTGACTACTCCCAGTCATAGCTGTCCCTCTTCTCTTA |
| | | TGGAGATCCCTCGACCTGCAGCCCAAGCTT |

[1017] In some embodiments, the polyA signal region is provided in Table 13. In some embodiments, the genetic element comprises a polyA sequence region chosen from polyA1, polyA2, polyA3, or a functional variant thereof. In some embodiments, the genetic element comprises the polyA signal region of PolyA1 or a functional variant thereof. In some embodiments, the polyA signal region comprises the nucleotide sequence of any one of SEQ ID NOs: 6590-6592, or a sequence with at least 70%, 75%, 80%, 85%, 90%, 95%, or 99% sequence identity thereto. In some embodiments, the polyA signal region comprises the nucleotide sequence of SEQ ID NO: 6590, or a nucleotide sequence with at least 70%, 75%, 80%, 85%, 90%, 95%, or 99% sequence identity thereto.

### Genetic Element Component: Introns

[1018] In some embodiments, the genetic element comprises at least one element to enhance the expression of a transgene encoding a payload. In some embodiments, an element that enhances expression of a transgene comprises an introns or functional variant thereof. In some embodiments, the genetic element comprises an intron or functional variant thereof. In some embodiments, the genetic element comprises at least two intron regions, e.g., at least 2 intron regions, at least 3 intron regions, at least 4 intron regions, or 5 or more intron regions.

[1019] In some embodiments, the genetic element comprises an intron chosen from a MVM intron (67-97 bps), an F.IX truncated intron 1 (300 bps), an β-globin SD/immunoglobulin heavy chain splice acceptor intron (250 bps), an adenovirus splice donor/immunoglobin splice acceptor intron (500 bps), SV40 late splice donor/splice acceptor intron (19S/16S) (180 bps), or a hybrid adenovirus splice donor/IgG splice acceptor intron (230 bps). In some embodiments, the genetic element comprises a human beta-globin intron region. In some embodiments, the human beta-globin intron region comprises the nucleotide sequence of SEQ ID NO: 6580 or 6595, or a nucleotide sequence with at least 70%, 75%, 80%, 85%, 90%, 95% or 99% sequence identity to SEQ ID NO: 6580 or 6595. In some embodiments, the genetic element comprises an ie intron 1 region. In some embodiments, the ie intron 1 region comprises the nucleotide sequence of SEQ ID NO: 6578, or a nucleotide sequence with at least 70%, 75%, 80%, 85%, 90%, 95% or 99% sequence identity thereto. In some embodiments, the genetic element comprises a first human beta-globin intron region, e.g., a first human beta-globin intron region comprising SEQ ID NO: 6595, and a second human beta-globin intron region, e.g., a second human beta-globin intron region comprising SEQ ID NO: 6580. In some embodiments, an ie intron 1 region, e.g., an ie intron 1 region comprising SEQ ID NO: 6578, and a human beta-globin intron region, e.g., a human beta-globin intron region comprising SEQ ID NO: 6595.

[1020] In some embodiments, the genetic element comprises an intron region provided in Table 67. In some embodiments, the genetic element comprises an intron region chosen from any one of Intron1 to Intron5, or a functional variant thereof. In some embodiments, the genetic element comprises Intron1. In some embodiments, the genetic element comprises Intron3. In some embodiments, the genetic element comprises Intron12. In some embodiments, the genetic element comprises Intron 12 and Intron3. In some embodiments, the genetic element comprises Intron1 and Intron12. In some embodiments, the genetic element comprises an intron region of any one of SEQ ID NOs: 6578-6588, 6595, or 6607-6609, or a sequence with at least 70%, 75%, 80%, 85%, 90%, 95%, or 99% sequence identity thereto. In some embodiments, the intron region comprises the nucleotide sequence of SEQ ID NO: 6578, or a nucleotide sequence with at least 70%, 75%, 80%, 85%, 90%, 95%, or 99% sequence identity thereto. In some embodiments, the intron region comprises the nucleotide sequence of SEQ ID NO: 6580, or a nucleotide sequence with at least 70%, 75%, 80%, 85%, 90%, 95%, or 99% sequence identity thereto. In some embodiments, the intron region comprises the nucleotide sequence of SEQ ID NO: 2040A, or a nucleotide sequence with at least 70%, 75%, 80%, 85%, 90%, 95%, or 99% sequence identity thereto.

TABLE 67
Intron Sequence Regions

| | SEQ | |
|---|---|---|
| Name | ID NO | Sequence |
| Intron 1 | 6578 | GTAAGTACCGCCTATAGAGTCTATAGGCCCAC |
| Intron2 | 6579 | GTAAGTACCGCCTAT |
| Intron3 | 6580 | AAAAAATGCTTTCTTCTTTTAATATACTTTTTTGTTTATCTTATTTCTAATACTT |
| | | TCCCTAATCTCTTTCTTTCAGGGCAATAATGATACAATGTATCATGCCTCTTTGC |
| | | ACCATTCTAAAGAATAACAGTGATAATTTCTGGGTTAAGGCAATAGCAATATTTC |
| | | TGCATATAAATATTTCTGCATATAAATTGTAACTGATGTAAGAGGTTTCATATTG |
| | | CTAATAGCAGCTACAATCCAGCTACCATTCTGCTTTTATTTTATGGTTGGGATAA |
| | | GGCTGGATTATTCTGAGTCCAAGCTAGGCCCTTTTGCTAATCATGTTCATACCTC |
| | | TTATCTTCCTCCCACAG |
| Intron4 | 6581 | TCTGCATATAAATTGTAACTGATGTAAGAGGTTTCATATTGCTAATAGCAGCTAC |
| | | AATCCAGCTACCATTCTGCTTTTATTTTATGGTTGGGATAAGGCTGGATTATTCT |
| | | GAGTCCAAGCTAGGCCCTTTTGCTAATCATGTTCATACCTCTTATCTTCCTCCCA |
| | | CAG |
| Intron5 | 6582 | AAAAAATGCTTTCTTCTTTTAATATACTTTTCTTTTGCTAATCATGTTCATACCT |
| | | CTTATCTTCCTCCCACAG |
| Intron6 | 6583 | AGGCTGGATTATTCTGAGTCCAAGCTAGGCCCTTTTGCTAATCATGTTCATACCT |
| | | CTTATCTTCCTCCCACAG |
| Intron7 | 6584 | AAAAAATGCTTTCTTCTTTTCAAGCTAGGCCCTTTTGCTAATCATGTTCATACCT |
| | | CTTATCTTCCTCCCACAG |
| Intron8 | 6585 | CAAGCTAGGCCCTTTTGCTAATCATGTTCATACCTCTTATCTTCCTCCCACAG |
| Intron9 | 6586 | GAACTGAAAAACCAGAAAGTTAACTGGTAAGTTTAGTCTTTTTGTCTTTTATTTC |
| | | AGGTCCCGGATCCGGTGGTGGTGCAAATCAAAGAACTGCTCCTCAGTGGATGTTG |
| | | CCTTTACTTCTAGGCCTGTACGGAAGTGTTACTTCTGCTCTAAAAGCTGCGGAAT |
| | | TGTACCC |
| Intron10 | 6587 | GGAGTCGCTGCGCGCTGCCTTCGCCCCGTGCCCCGCTCCGCCGCCGCCTCGCGCC |
| | | GCCCGCCCCGGCTCTGACTGACCGCGTTACTCCCACAGGTGAGCGGGCGGGACGG |
| | | CCCTTCTCCTCCGGGCTGTAATTAGCGCTTGGTTTAATGACGGCTTGTTTCTTTT |
| | | CTGTGGCTGCGTGAAAGCCTTGAGGGGCTCCGGGAGGGCCCTTTGTGCGGGGGGA |
| | | GCGGCTCGGGGGGTGCGTGCGTGTGTGTGTGCGTGGGGAGCGCCGCGTGCGGCTC |
| | | CGCGCTGCCCGGCGGCTGTGAGCGCTGCGGGCGCGGCGCGGGGCTTTGTGCGCTC |
| | | CGCAGTGTGCGCGAGGGGAGCGCGGCCGGGGGCGGTGCCCCGCGGTGCGGGGGGG |
| | | GCTGCGAGGGGAACAAAGGCTGCGTGCGGGGTGTGTGCGTGGGGGGGTGAGCAGG |
| | | GGGTGTGGGCGCGTCGGTCGGGCTGCAACCCCCCCTGCACCCCCCTCCCCGAGTT |
| | | GCTGAGCACGGCCCGGCTTCGGGTGCGGGGCTCCGTACGGGGCGTGGCGCGGGGC |
| | | TCGCCGTGCCGGGCGGGGGGTGGCGGCAGGTGGGGGTGCCGGGGGGGGCGGGGCC |
| | | GCCTCGGGCCGGGGAGGGCTCGGGGGAGGGGCGCGGCGGCCCCCGGAGCGCCGGC |
| | | GGCTGTCGAGGCGCGGCGAGCCGCAGCCATTGCCTTTTATGGTAATCGTGCGAGA |
| | | GGGCGCAGGGACTTCCTTTGTCCCAAATCTGTGCGGAGCCGAAATCTGGGAGGCG |
| | | CCGCCGCACCCCCTCTAGCGGGCGCGGGGCGAAGCGGTGCGGCGCCGGCAGGAAG |
| | | GAAATGGGGGGGGAGGGCCTTCGTGCGTCGCCGCGCCGCCGTCCCCTTCTCCCTC |
| | | TCCAGCCTCGGGGCTGTCCGCGGGGGGACGGCTGCCTTCGGGGGGGACGGGGCAG |
| | | GGCGGGGTTCGGCTTCTGGCGTGTGACCGGCGGCTCTAGAGCCTCTGCTAACCAT |
| | | GTTCATGCCTTCTTCTTTTTCCTACAGCTCCTGGGCAACGTGCTGGTTATTGTGC |
| | | TGTCTCATCATTTTGGCAAAGAATTCGAG |
| Intron 11 | 6588 | CCTCTGCTAACCATGTTCATGCCTTCTTCTTTTTCCTACAG |
| Intron 12 | 6595 | TCAGATCGCCTGGAGACGCCATCCACGCTGTTTTGACCTCCATAGAAGACACCGG |
| | | GACCGATCCAGCCTCCGCGGATTCGAATCCCGGCCGGGAACGGTGCATTGGAACG |
| | | CGGATTCCCCGTGCCAAGAGTGACGTAAGTACCGCCTATAGAGTCTATAGGCCCA |
| | | CAAAAAATGCTTTCTTCTTTTAATATACTTTTTTGTTTATCTTATTTCTAATACT |
| | | TTCCCTAATCTCTTTCTTTCAGGGCAATAATGATACAATGTATCATGCCTCTTTG |
| | | CACCATTCTAAAGAATAACAGTGATAATTTCTGGGTTAAGGCAATAGCAATATTT |
| | | CTGCATATAAATATTTCTGCATATAAATTGTAACTGATGTAAGAGGTTTCATATT |
| | | GCTAATAGCAGCTACAATCCAGCTACCATTCTGCTTTTATTTTATGGTTGGGATA |
| | | AGGCTGGATTATTCTGAGTCCAAGCTAGGCCCTTTTGCTAATCATGTTCATACCT |
| | | CTTATCTTCCTCCCACAGCTCCTGGGCAACGTGCTGGTCTGTGTGCTGGCCCATC |
| | | ACTTTGGCAAAGAATT |
| Intron 13 | 6607 | ATTCGAATCCCGGCCGGGAACGGTGCATTGGAACGCGGATTCCCCGTGCCAAGAG |
| | | TGACGTAAGTACCGCCTATAGAGTCTATAGGCCCACAAAAAATGCTTTCTTCTTT |
| | | TAATATACTTTTTTGTTTATCTTATTTCTAATACTTTCCCTAATCTCTTTCTTTC |
| | | AGGGCAATAATGATACAATGTATCATGCCTCTTTGCACCATTCTAAAGAATAACA |
| | | GTGATAATTTCTGGGTTAAGGCAATAGCAATATTTCTGCATATAAATATTTCTGC |
| | | ATATAAATTGTAACTGATGTAAGAGGTTTCATATTGCTAATAGCAGCTACAATCC |
| | | AGCTACCATTCTGCTTTTATTTTATGGTTGGGATAAGGCTGGATTATTCTGAGTC |
| | | CAAGCTAGGCCCTTTTGCTAATCATGTTCATACCTCTTATCTTCCTCCCACAGCT |
| | | CCTGGGCAACGTGCTGGTCTGTGTGCTGGCCCATCACTTTGGCAAAGAATT |
| Intron 14 | 6608 | TCAGATCGCCTGGAGACGCCATCCACGCTGTTTTGACCTCCATAGAAGACACCGG |
| | | GACCGATCCAGCCTCCGCGGATTCGAATCCCGGCCGGGAACGGTGCATTGGAACG |
| | | CGGATTCCCCGTGCCAAGAGTGACGTAAGTACCGCCTATAGAGTCTATAGGCCCA |
| | | CTCTGCATATAAATTGTAACTGATGTAAGAGGTTTCATATTGCTAATAGCAGCTA |
| | | CAATCCAGCTACCATTCTGCTTTTATTTTATGGTTGGGATAAGGCTGGATTATTC |
| | | TGAGTCCAAGCTAGGCCCTTTTGCTAATCATGTTCATACCTCTTATCTTCCTCCC |
| | | ACAGCTCCTGGGCAACGTGCTGGTCTGTGTGCTGGCCCATCACTTTGGCAAAGAA |
| | | TT |
| Intron 15 | 6609 | TCAGATCGCCTGGAGACGCCATCCACGCTGTTTTGACCTCCATAGAAGACACCGG |
| | | GACCGATCCAGGTAAGTACCGCCTATAGAGTCTATAGGCCCACAAAAAATGCTTT |
| | | CTTCTTTTAATATACTTTTTTGTTTATCTTATTTCTAATACTTTCCCTAATCTCT |
| | | TTCGCTGGATTATTCTGAGTCCAAGCTAGGCCCTTTTGCTAATCATGTTCATACC |
| | | TCTTATCTTCCTCCCACAGCTCCTGGGCAACGTGCTGGTCTGTGTGCTGGCCCAT |
| | | CACTTTGGCAAAGAATT |

### Genetic Element Component: Exons

[1021] In some embodiments, the genetic element comprises an exon sequence region. In some embodiments, the genetic element comprises at least 2, at least 3, at least 4, or at least 5 exon regions. In some embodiments, the genetic element comprises 2 exon regions.

[1022] In some embodiments, the genetic element comprises an ie exon 1 region. In some embodiments, the ie exon 1 region comprises the nucleotide sequence of SEQ ID NO: 6573, or a nucleotide sequence with at least 70%, 75%, 80%, 85%, 90%, 95%, or 99% sequence identity thereto. In some embodiments, the genetic element comprises a human beta-globin exon region. In some embodiments, the human beta-globin exon region comprises a nucleotide sequence of SEQ ID NO: 6576 or a sequence with at least 70%, 75%, 80%, 85%, 90%, 95%, or 99% sequence identity thereto. Tn some embodiments, the genetic element comprises an ie exon 1 region and a human beta-globin exon region.

[1023] In some embodiments, the exon region is provided in Table 66. In some embodiments, the genetic element comprises an exon region chosen from Exon1, Exon2, Exon3, Exon4, or a function variant thereof. In some embodiments, the genetic element comprises Exon1. In some embodiments, the genetic element comprises Exon4. In some embodiments, the genetic element comprises Exon1 and Exon4. In some embodiments, the exon region comprises the nucleotide sequence of any one of SEQ ID NOs: 6573-6577, or a nucleotide sequence with at least 70%, 75%, 80%, 85%, 90%, 95%, or 99% sequence identity thereto. In some embodiments, the exon region comprises the nucleotide sequence of SEQ ID NO: 6573, or a nucleotide sequence with at least 70%, 75%, 80%, 85%, 90%, 95%, or 99% sequence identity thereto. In some embodiments, the exon region comprises the nucleotide sequence of SEQ ID NO: 6576, or a nucleotide sequence with at least 70%, 75%, 80%, 85%, 90%, 95%, or 99% sequence identity thereto.

TABLE 66
Exon Sequence Regions

| SEQ | |
|---|---|
| ID | |
| NO | Sequence |
| 6573 | TCAGATCGCCTGGAGACGCCATCCACGCTG |
| | TTTTGACCTCCATAGAAGACACCGGGACCG |
| | ATCCAGCCTCCGCGGATTCGAATCCCGGCC |
| | GGGAACGGTGCATTGGAACGCGGATTCCCC |
| | GTGCCAAGAGTGAC |
| 6574 | TTGACCTCCATAGAAGACACCGGGACCGAT |
| | CCAGCCTCCGCGGATTCGAATCCCGGCCGG |
| | GAACGGTGCATTGGAACGCGGATTCCCCGT |
| | GCCAAGAGTGAC |
| 6575 | ATTCGAATCCCGGCCGGGAACGGTGCATTG |
| | GAACGCGGATTCCCCGTGCCAAGAGTGAC |
| 6576 | CTCCTGGGCAACGTGCTGGTCTGTGTGCTG |
| | GCCCATCACTTTGGCAAAGAATT |
| 6577 | CTCCTGGGCAACGTGCTGGTTATTGTGCTG |
| | TCTCATCATTTTGGCAAAGAATTC |

### Payloads

[1024] In some embodiments, an AAV particle, e.g., an AAV particle for the vectorized delivery of an antibody molecule described herein (e.g., an anti-HER2 antibody molecule), comprises a payload. In some embodiments, an AAV particle described herein comprises at least two, at least three, or at least 4 payloads. In some embodiments, an AAV particle, e.g., an AAV particle for the vectorized delivery of an antibody molecule described herein (e.g., an anti-HER2 antibody molecule), comprises a nucleic acid comprising a transgene encoding a payload. In some embodiments, the payload comprises an antibody molecule, e.g., an anti-HER2 antibody molecule. In some embodiments, the payload comprises a secreted protein, an intracellular protein, an extracellular protein, a membrane protein, a structural protein, a functional protein, or a protein, e.g., a mammalian protein, involved in immune system regulation. In some embodiments, a nucleic acid comprises a transgene encoding an antibody molecule that binds to HER2.

[1025] In some embodiments, the nucleic acid molecule comprising the transgene encoding a payload further comprises a nucleotide sequence encoding a linker (e.g., a linker connecting a heavy chain variable region (VH) and a light chain variable region (VL) of an antibody molecule) and/or a cleavage site. In some embodiments, the nucleic acid molecule comprising the transgene encoding a payload further comprises a nucleotide sequence encoding a signal sequence.

[1026] In some embodiments, the nucleic acid encoding the payload may be constructed, e.g., organized, similar to, e.g., mirroring, the natural organization of an mRNA. In some embodiments, the nucleic acid encoding the payload may comprise coding and/or non-coding nucleotide sequences. In some embodiments, the nucleic acid encoding the payload may encode a coding and/or a non-coding RNA.

[1027] In such an embodiment, the nucleic acid comprising a transgene encoding a payload (e.g., an antibody molecule) is replicated and packaged into an AAV particle. In some embodiments, following transduction of a cell with an AAV particle comprising a payload (e.g., an antibody molecule), the cell expresses the payload. In some embodiments, the payload, e.g., antibody molecule, produced by a cell transduced by an AAV particle comprising the payload, is secreted from the cell.

### Antibody Molecules

[1028] In some embodiments, the nucleic acid comprises a transgene encoding an antibody molecule. In some embodiments, the encoded antibody molecule binds to HER2. For example, the encoded antibody molecule binds to an epitope, e.g., a linear or conformational epitope on HER2.

[1029] In some embodiments, the encoded antibody molecule comprises at least one immunoglobulin variable domain sequence. An antibody molecule may include, for example, full-length, mature antibodies and antigen-binding fragments of an antibody. For example, an antibody molecule can include a heavy (H) chain variable domain sequence (abbreviated herein as VH), and a light (L) chain variable domain sequence (abbreviated herein as VL). In another example, an antibody molecule includes two heavy (H) chain variable domain sequences and two light (L) chain variable domain sequence, thereby forming two antigen binding sites, such as Fab, Fab′, F(ab′)2, Fc, Fd, Fd′, Fv, single chain antibodies (scFv for example), single variable domain antibodies, diabodies (Dab) (bivalent and bispecific), and chimeric (e.g., humanized) antibodies, which may be produced by the modification of whole antibodies or those synthesized de novo using recombinant DNA technologies. These functional antibody fragments retain the ability to selectively bind with their respective antigen or receptor. Antibodies and antibody fragments can be from any class of antibodies including, but not limited to, IgG, IgA, IgM, IgD, and IgE, and from any subclass (e.g., IgG1, IgG2, IgG3, and IgG4) of antibodies. The encoded antibodies of the present disclosure can be monoclonal or polyclonal. The encoded antibody can also be a human, humanized, CDR-grafted, or in vitro generated antibody. The encoded antibody can have a heavy chain constant region chosen from, e.g., IgG1, IgG2, IgG3, or IgG4. The encoded antibody can also have a light chain chosen from, e.g., kappa or lambda.

[1030] Examples of antigen-binding fragments include: (i) a Fab fragment, a monovalent fragment consisting of the VL, VH, CL and CH1 domains; (ii) a F(ab′)2 fragment, a bivalent fragment comprising two Fab fragments linked by a disulfide bridge at the hinge region; (iii) a Fd fragment consisting of the VH and CH1 domains; (iv) a Fv fragment consisting of the VL and VH domains of a single arm of an antibody, (v) a diabody (dAb) fragment, which consists of a VH domain; (vi) a camelid or camelized variable domain; (vii) a single chain Fv (scFv), see e.g., Bird et al. (1988) Science 242:423-426; and Huston et al. (1988) Proc. Natl. Acad. Sci. USA 85:5879-5883); and (viii) a single domain antibody. These antibody fragments are obtained using conventional techniques known to those with skill in the art, and the fragments are screened for utility in the same manner as are intact antibodies. An antibody fragment can also be incorporated into single domain antibodies, maxibodies, minibodies, nanobodies, intrabodies, diabodies, triabodies, tetrabodies, v-NAR and bis-scFv (see, for example, Hollinger and Hudson, Nature Biotechnology 23:1126-1136, 2005).

[1031] In some embodiments, an encoded antibody molecule of the present disclosure comprises a functional fragment or variant thereof. Constant regions of the antibodies can be altered, e.g., mutated, to modify the properties of the antibody (e.g., to increase or decrease one or more of: Fc receptor binding, antibody glycosylation, the number of cysteine residues, effector cell function, or complement function).

[1032] In some embodiments, the encoded antibody molecule can be single domain antibody. Single domain antibodies can include antibodies whose complementary determining regions are part of a single domain polypeptide. Examples include, but are not limited to, heavy chain antibodies, antibodies naturally devoid of light chains, single domain antibodies derived from conventional 4-chain antibodies, engineered antibodies and single domain scaffolds other than those derived from antibodies. Single domain antibodies may be any of the art, or any future single domain antibodies. Single domain antibodies may be derived from any species including, but not limited to mouse, human, camel, llama, fish, shark, goat, rabbit, and bovine. According to another aspect of the invention, a single domain antibody is a naturally occurring single domain antibody known as heavy chain antibody devoid of light chains. Such single domain antibodies are disclosed in WO 9404678, for example. For clarity reasons, this variable domain derived from a heavy chain antibody naturally devoid of light chain is known herein as a VHH or nanobody to distinguish it from the conventional VH of four chain immunoglobulins. Such a VHH molecule can be derived from antibodies raised in Camelidae species, for example in camel, llama, dromedary, alpaca and guanaco. Other species besides Camelidae may produce heavy chain antibodies naturally devoid of light chain; such VHHs are within the scope of the invention.

[1033] In some embodiments, the VH and VL regions of the encoded antibody molecule can be subdivided into regions of hypervariability, termed complementarity determining regions (CDR), interspersed with regions that are more conserved, termed framework regions (FR or FW).

[1034] The extent of the framework region and CDRs has been precisely defined by a number of methods (see, Kabat, E. A., et al. (1991) Sequences of Proteins of Immunological Interest, Fifth Edition, U.S. Department of Health and Human Services, NIH Publication No. 91-3242; Chothia, C. et al. (1987) J. Mol. Biol. 196:901-917; and the AbM definition used by Oxford Molecular's AbM antibody modeling software. See, generally, e.g., Protein Sequence and Structure Analysis of Antibody Variable Domains. In: Antibody Engineering Lab Manual (Ed.: Duebel, S. and Kontermann, R., Springer-Verlag, Heidelberg).

[1035] Complementarity determining region, and CDR, as used herein refer to the sequences of amino acids within antibody variable regions which confer antigen specificity and binding affinity. In general, there are three CDRs in each heavy chain variable region (HCDR1, HCDR2, HCDR3) and three CDRs in each light chain variable region (LCDR1, LCDR2, LCDR3).

[1036] The precise amino acid sequence boundaries of a given CDR can be determined using any of a number of well-known schemes, including those described by Kabat et al. (1991), “Sequences of Proteins of Immunological Interest,” 5th Ed. Public Health Service, National Institutes of Health, Bethesda, MD (Kabat numbering scheme), Al-Lazikani et al., (1997) JMB 273, 927-948 (Chothia numbering scheme). In some embodiments, the CDRs defined according the Chothia number scheme are also sometimes referred to as hypervariable loops.

[1037] For example, under Kabat, the CDR amino acid residues in the heavy chain variable domain (VH) are numbered 31-35 (HCDR1), 50-65 (HCDR2), and 95-102 (HCDR3); and the CDR amino acid residues in the light chain variable domain (VL) are numbered 24-34 (LCDR1), 50-56 (LCDR2), and 89-97 (LCDR3). Under Chothia the CDR amino acids in the VH are numbered 26-32 (HCDR1), 52-56 (HCDR2), and 95-102 (HCDR3); and the amino acid residues in VL are numbered 26-32 (LCDR1), 50-52 (LCDR2), and 91-96 (LCDR3). By combining the CDR definitions of both Kabat and Chothia, the CDRs consist of amino acid residues 26-35 (HCDR1), 50-65 (HCDR2), and 95-102 (HCDR3) in human VH and amino acid residues 24-34 (LCDR1), 50-56 (LCDR2), and 89-97 (LCDR3) in human VL.

[1038] In some embodiments, the antigen binding domain of the encoded antibody molecules of the present disclosure is the part of the encoded antibody molecule that comprises determinants that form an interface that binds to the HER2 protein or an epitope thereof. With respect to proteins (or protein mimetics), the antigen-binding site typically includes one or more loops (of at least four amino acids or amino acid mimics) that form an interface that binds to the HER2 protein. Typically, the antigen-binding site of an antibody molecule includes at least one or two CDRs and/or hypervariable loops, or more typically at least three, four, five or six CDRs and/or hypervariable loops.

[1039] The encoded antibody molecule can be a monoclonal antibody molecule or a polyclonal antibody molecule. In some embodiments, a monoclonal antibody or a monoclonal antibody composition refer to a preparation of antibody molecules of single molecular composition. A monoclonal antibody composition displays a single binding specificity and affinity for a particular epitope. A monoclonal antibody can be made by hybridoma technology or by methods that do not use hybridoma technology (e.g., recombinant methods).

[1040] In some embodiments, the sequences of an antibody molecule to be included in an encoded payload described herein can be generated by recombinant libraries, e.g., generated by phage display or by combinatorial methods.

[1041] Phage display and combinatorial methods for generating antibodies are known in the art (as described in, e.g., Ladner et al. U.S. Pat. No. 5,223,409; Kang et al. International Publication No. WO 92/18619; Dower et al. International Publication No. WO 91/17271; Winter et al. International Publication WO 92/20791; Markland et al. International Publication No. WO 92/15679; Breitling et al. International Publication WO 93/01288; McCafferty et al. International Publication No. WO 92/01047; Garrard et al. International Publication No. WO 92/09690; Ladner et al. International Publication No. WO 90/02809; Fuchs et al. (1991) Bio/Technology 9:1370-1372; Hay et al. (1992) Hum Antibod Hybridomas 3:81-85; Huse et al. (1989) Science 246:1275-1281; Griffths et al. (1993) EMBO J 12:725-734; Hawkins et al. (1992) J Mol Biol 226:889-896; Clackson et al. (1991) Nature 352:624-628; Gram et al. (1992) PNAS 89:3576-3580; Garrad et al. (1991) Bio/Technology 9:1373-1377; Hoogenboom et al. (1991) Nuc Acid Res 19:4133-4137; and Barbas et al. (1991) PNAS 88:7978-7982, the contents of all of which are incorporated by reference herein).

[1042] In some embodiments, the sequences of an antibody molecule to be included in an encoded payload described herein can be generated from an antibody molecule that is designed using the VERSITOPE™ Antibody Generation or BIOATLA®, e.g., in US20130303399, US20130281303, WO2012009026, WO2016033331, WO2016036916, and U.S. Pat. No. 8,859,467, the contents of which are herein incorporated by reference in their entirety. In some embodiments, the sequences of an antibody molecule to be included in an encoded payload described herein can be derived from an antibody molecule that is designed and/or produced using the methods described, e.g., in WO2017189959 and WO2020223276, the contents of which are herein incorporated by reference in their entirety.

[1043] In some embodiments, the encoded antibody comprises an amino acid sequence of a fully human antibody (e.g., an antibody made in a mouse which has been genetically engineered to produce an antibody from a human immunoglobulin sequence), or a non-human antibody, e.g., a rodent (mouse or rat), goat, primate (e.g., monkey), camel antibody. Preferably, the non-human antibody is a rodent (mouse or rat antibody). Methods of producing rodent antibodies are known in the art.

[1044] Human monoclonal antibodies can be generated using transgenic mice carrying the human immunoglobulin genes rather than the mouse system. Splenocytes from these transgenic mice immunized with the antigen of interest are used to produce hybridomas that secrete human mAbs with specific affinities for epitopes from a human protein (see, e.g., Wood et al. International Application WO 91/00906, Kucherlapati et al. PCT publication WO 91/10741; Lonberg et al. International Application WO 92/03918; Kay et al. International Application 92/03917; Lonberg, N. et al. 1994 Nature 368:856-859; Green, L. L. et al. 1994 Nature Genet. 7:13-21; Morrison, S. L. et al. 1994 Proc. Natl. Acad. Sci. USA 81:6851-6855; Bruggeman et al. 1993 Year Immunol 7:33-40; Tuaillon et al. 1993 PNAS 90:3720-3724; Bruggeman et al. 1991 Eur J Immunol 21:1323-1326).

[1045] In some embodiments, the encoded antibody comprises an amino acid sequence of an antibody in which the variable region, or a portion thereof, e.g., the CDRs, are generated in a non-human organism, e.g., a rat or mouse. Encoded antibody molecules comprising chimeric, CDR-grafted, and humanized antibodies are within the invention. Encoded antibody molecules comprising the sequences of antibodies generated in a non-human organism, e.g., a rat or mouse, and then modified, e.g., in the variable framework or constant region, to decrease antigenicity in a human are within the invention.

[1046] An effectively human protein is a protein that does substantially not evoke a neutralizing antibody response, e.g., the human anti-murine antibody (HAMA) response. HAMA can be problematic in a number of circumstances, e.g., if the antibody molecule is administered repeatedly, e.g., in treatment of a chronic or recurrent disease condition. A HAMA response can make repeated antibody administration potentially ineffective because of an increased antibody clearance from the serum (see, e.g., Saleh et al., Cancer Immunol. Immunother., 32:180-190 (1990)) and also because of potential allergic reactions (see, e.g., LoBuglio et al., Hybridoma, 5:5117-5123 (1986)).

[1047] Chimeric antibodies can be produced by recombinant DNA techniques known in the art (see Robinson et al., International Patent Publication PCT/US86/02269; Akira, et al., European Patent Application 184,187; Taniguchi, M., European Patent Application 171,496; Morrison et al., European Patent Application 173,494; Neuberger et al., International Application WO 86/01533; Cabilly et al. U.S. Pat. No. 4,816,567; Cabilly et al., European Patent Application 125,023; Better et al. (1988 Science 240:1041-1043); Liu et al. (1987) PNAS 84:3439-3443; Liu et al., 1987, J. Immunol. 139:3521-3526; Sun et al. (1987) PNAS 84:214-218; Nishimura et al., 1987, Canc. Res. 47:999-1005; Wood et al. (1985) Nature 314:446-449; and Shaw et al., 1988, J. Natl Cancer Inst. 80:1553-1559).

[1048] A humanized or CDR-grafted antibody will have at least one or two but generally all three recipient CDRs (of heavy and or light immuoglobulin chains) replaced with a donor CDR. The antibody may be replaced with at least a portion of a non-human CDR or only some of the CDRs may be replaced with non-human CDRs. It is only necessary to replace the number of CDRs required for binding of the humanized antibody to PD-1. Preferably, the donor will be a rodent antibody, e.g., a rat or mouse antibody, and the recipient will be a human framework or a human consensus framework. Typically, the immunoglobulin providing the CDRs is called the donor and the immunoglobulin providing the framework is called the acceptor. In some embodiments, the donor immunoglobulin is a non-human (e.g., rodent). The acceptor framework is a naturally-occurring (e.g., a human) framework or a consensus framework, or a sequence about 85% or higher, preferably 90%, 95%, 99% or higher identical thereto.

[1049] In some embodiments, the consensus sequence refers to the sequence formed from the most frequently occurring amino acids (or nucleotides) in a family of related sequences (See e.g., Winnaker, From Genes to Clones (Verlagsgesellschaft, Weinheim, Germany 1987). In a family of proteins, each position in the consensus sequence is occupied by the amino acid occurring most frequently at that position in the family. If two amino acids occur equally frequently, either can be included in the consensus sequence. In some embodiments, the consensus framework refers to the framework region in the consensus immunoglobulin sequence.

[1050] An antibody can be humanized by methods known in the art (see e.g., Morrison, S. L., 1985, Science 229:1202-1207, by Oi et al., 1986, BioTechniques 4:214, and by Queen et al. U.S. Pat. Nos. 5,585,089, 5,693,761 and 5,693,762, the contents of all of which are hereby incorporated by reference).

[1051] Humanized or CDR-grafted antibodies can be produced by CDR-grafting or CDR substitution, wherein one, two, or all CDRs of an immunoglobulin chain can be replaced. See e.g., U.S. Pat. No. 5,225,539; Jones et al. 1986 Nature 321:552-525; Verhoeyan et al. 1988 Science 239:1534; Beidler et al. 1988 J. Immunol. 141:4053-4060; Winter U.S. Pat. No. 5,225,539, the contents of all of which are hereby expressly incorporated by reference. Winter describes a CDR-grafting method which may be used to prepare the humanized antibodies of the present invention (UK Patent Application GB 2188638A, filed on Mar. 26, 1987; Winter U.S. Pat. No. 5,225,539), the contents of which is expressly incorporated by reference.

[1052] In some embodiments, the encoded antibodies comprise the sequences of humanized antibodies in which specific amino acids have been substituted, deleted or added. Criteria for selecting amino acids from the donor are described in U.S. Pat. No. 5,585,089, e.g., columns 12-16 of U.S. Pat. No. 5,585,089, e.g., columns 12-16 of U.S. Pat. No. 5,585,089, the contents of which are hereby incorporated by reference. Other techniques for humanizing antibodies are described in Padlan et al. EP 519596 A1, published on Dec. 23, 1992.

[1053] In some embodiments, the encoded antibody molecule can be a single chain antibody. A single-chain antibody (scFV) may be engineered (see, for example, Colcher, D. et al. (1999) Ann N Y Acad Sci 880:263-80; and Reiter, Y. (1996) Clin Cancer Res 2:245-52). The single chain antibody can be dimerized or multimerized to generate multivalent antibodies having specificities for different epitopes of the same target protein.

[1054] In yet other embodiments, the antibody molecule has a heavy chain constant region chosen from, e.g., the heavy chain constant regions of IgG1, IgG2, IgG3. IgG4, IgM, IgA1, IgA2, IgD, and IgE; particularly, chosen from, e.g., the (e.g., human) heavy chain constant regions of IgG1, IgG2, IgG3, and IgG4. In another embodiment, the antibody molecule has a light chain constant region chosen from, e.g., the (e.g., human) light chain constant regions of kappa or lambda. The constant region can be altered, e.g., mutated, to modify the properties of the antibody (e.g., to increase or decrease one or more of: Fc receptor binding, antibody glycosylation, the number of cysteine residues, effector cell function, and/or complement function). In some embodiments the antibody has: effector function; and can fix complement. In other embodiments the antibody does not recruit effector cells; or fix complement. In other embodiments, the antibody has reduced or no ability to bind an Fc receptor. For example, it is an isotype or subtype, fragment or other mutant, which does not support binding to an Fc receptor, e.g., it has a mutagenized or deleted Fc receptor binding region.

[1055] Methods for altering an antibody constant region are known in the art. Antibodies with altered function, e.g. altered affinity for an effector ligand, such as FcR on a cell, or the C1 component of complement can be produced by replacing at least one amino acid residue in the constant portion of the antibody with a different residue (see e.g., EP 388,151 A1, U.S. Pat. Nos. 5,624,821 and 5,648,260, the contents of all of which are hereby incorporated by reference). Similar type of alterations could be described which if applied to the murine, or other species immunoglobulin would reduce or eliminate these functions.

[1056] An antibody molecule can be derivatized or linked to another functional molecule (e.g., another peptide or protein). In some embodiments, a derivatized antibody molecule is one that has been modified. Methods of derivatization include but are not limited to the addition of a fluorescent moiety, a radionucleotide, a toxin, an enzyme or an affinity ligand such as biotin. In some embodiments, the nucleic acid sequence comprising the transgene encoding the antibody molecule further encodes a fluorescent moiety, a radionucleotide, a toxin, an enzyme or an affinity ligand such as biotin. Accordingly, the encoded antibody molecules of the invention are intended to include derivatized and otherwise modified forms of the antibodies described herein, including immunoadhesion molecules. For example, an encoded antibody molecule can be functionally linked (by genetic fusion or otherwise) to one or more other molecular entities, such as another antibody (e.g., a bispecific antibody or a diabody), a detectable agent, a cytotoxic agent, a pharmaceutical agent, and/or a protein or peptide that can mediate association of the antibody or antibody portion with another molecule (such as a streptavidin core region or a polyhistidine tag). In some embodiments, the nucleic acid sequence comprising the transgene encoding the antibody molecule further encodes a another antibody (e.g., a bispecific antibody or a diabody), a detectable agent, a cytotoxic agent, a pharmaceutical agent, and/or a protein or peptide that can mediate association of the antibody or antibody portion with another molecule (e.g., a tag, e.g., a tag described herein).

### Multispecific Antibody Molecules

[1057] In some embodiments, the encoded antibody molecule is a multispecific antibody molecule, e.g., it comprises a plurality of immunoglobulin variable domains sequences, wherein a first immunoglobulin variable domain sequence of the plurality has binding specificity for a first epitope and a second immunoglobulin variable domain sequence of the plurality has binding specificity for a second epitope. In some embodiments, the first and second epitopes are on the same antigen, e.g., the same protein (or subunit of a multimeric protein). In some embodiments, the first and second epitopes overlap. In some embodiments, the first and second epitopes do not overlap. In some embodiments, the first and second epitopes are on different antigens, e.g., the different proteins (or different subunits of a multimeric protein). In some embodiments, a multispecific antibody molecule comprises a third, fourth or fifth immunoglobulin variable domain. In some embodiments, a multispecific antibody molecule is a bispecific antibody molecule, a trispecific antibody molecule, or tetraspecific antibody molecule. In some embodiments, the encoded anti-HER2 molecule is a multispecific antibody molecule.

[1058] In some embodiments, an encoded multispecific antibody molecule is an encoded bispecific antibody molecule. A bispecific antibody has specificity for no more than two antigens. A bispecific antibody molecule is characterized by a first immunoglobulin variable domain sequence which has binding specificity for a first epitope and a second immunoglobulin variable domain sequence that has binding specificity for a second epitope. In some embodiments, the first and second epitopes are on the same antigen, e.g., the same protein (or subunit of a multimeric protein). In some embodiments, the first and second epitopes overlap. In some embodiments, the first and second epitopes do not overlap. In some embodiments, the first and second epitopes are on different antigens, e.g., the different proteins (or different subunits of a multimeric protein). In some embodiments, a bispecific antibody molecule comprises a heavy chain variable domain sequence and a light chain variable domain sequence which have binding specificity for a first epitope and a heavy chain variable domain sequence and a light chain variable domain sequence which have binding specificity for a second epitope. In some embodiments, a bispecific antibody molecule comprises a half antibody having binding specificity for a first epitope and a half antibody having binding specificity for a second epitope. In some embodiments, a bispecific antibody molecule comprises a half antibody, or fragment thereof, having binding specificity for a first epitope and a half antibody, or fragment thereof, having binding specificity for a second epitope. In some embodiments, a bispecific antibody molecule comprises a scFv, or fragment thereof, have binding specificity for a first epitope and a scFv, or fragment thereof, have binding specificity for a second epitope. In some embodiment, the encoded anti-HER2 antibody is a bispecific antibody molecule.

[1059] In another aspect, the invention relates to a multispecific, e.g., bispecific (e.g., biparatopic), antibody molecule comprising one or more HER-2 antigen binding domains, such as but not limited to an anti-HER2 antibody or antibody fragment comprising one or more CDRs, VH, heavy chain, VL, and/or light chain thereof. Non-limiting anti-HER2 antibody molecule sequences are provided in Tables 3A-3C and 20.

[1060] In some embodiments, the antibody molecule encoded by a transgene described herein is an anti-HER2 bispecific antibody molecule. In some embodiments, the anti-HER2 bispecific antibody molecule is monovalent or bivalent. In some embodiments, the anti-HER2 bispecific antibody molecule is a biparatopic antibody molecule. In some embodiments, the anti-HER2 bispecific antibody molecule comprises an Fc region or a variant thereof, e.g., as provided in Table 20. In some embodiments, the Fc region has reduced, e.g., ablated, affinity for an Fc receptor, e.g., an Fc receptor described herein. In some embodiments, the reduced affinity is compared to an otherwise similar antibody with a wild type Fc region. In some embodiments, the Fc receptor comprises a mutation at one or more of (e.g., all of) positions I253 (e.g., I253A), H310 (e.g., H310A or H310Q), and/or H435 (e.g., H435A or H435Q), numbered according to the EU index as in Kabat. In some embodiments, a bispecific antibody molecule described herein comprises a variant Fc region with reduced effector function (e.g., reduced ADCC). In some embodiments, the Fc region comprises a mutation at one or more of (e.g., all of) positions L235 (e.g., L235V), F243 (e.g., F243L), R292 (e.g., R292P), Y300 (e.g., Y300L), and P396 (e.g., P396L), numbered according to the EU index as in Kabat.

[1061] In some embodiments, an anti-HER2 bispecific antibody molecule comprises a first antigen binding domain and a second antigen binding domain. In some embodiments, the first antigen binding domain binds domain I of HER2 and the second antigen binding domain that binds domain IV of HER2. In some embodiments, the first antigen binding domain that binds domain II of HER2 and the second antigen binding domain that binds domain IV of HER2. In some embodiments, the first antigen binding domain that binds domain III of HER2 and the second antigen binding domain that binds domain IV of HER2. In some embodiments, the first antigen binding domain that binds domain I of HER2 and the second antigen binding domain that binds domain II of HER2. In some embodiments, the first antigen binding domain that binds domain I of HER2 and the second antigen binding domain that binds domain III of HER2. In some embodiments, the first antigen binding domain that binds domain II of HER2 and the second antigen binding domain that binds domain III of HER2. In some embodiments, the first and/or second antigen binding domain comprise an IgG antibody, single-chain Fv (scFv), a scFv fragment, a Fab, a single-chain Fab (scFabs), a single-chain antibody, a diabody, an antibody variable domain, a VHH, a single domain antibody, and/or a nanobody.

[1062] In some embodiments, the first antigen binding domain (e.g., an scFv) is located at the N-terminus of the VL of the second binding domain (e.g., a full antibody, e.g., an IgG antibody), e.g., linked via a peptide linker. In some embodiments, a polypeptide of the bispecific antibody molecule comprises the following sequences, from N-terminal to C-terminal: VH of the first binding domain, first peptide linker (e.g., a (G4S)3 linker (SEQ ID NO: 4537)), VL of first binding domain, second peptide linker (e.g., a (G4S) linker (SEQ ID NO: 4535)), VL of the second binding domain and CL. In some embodiments, a polypeptide of the bispecific antibody molecule comprises the following sequences: from N-terminal to C-terminal: VH of the second binding domain, CH1, CH2, and CH3. In some embodiments, the bispecific antibody molecule comprises an Fc region that is mutated to have reduced binding to Fc receptor or reduced ADCC, e.g., an Fc region having the mutations L235V, F243L, R292P, Y300L, and P396L, numbered according to the EU index as in Kabat. In some embodiments, the first antigen binding fragment comprises an anti-HER2 binding domain that binds domain IV of HER2, e.g., an anti-HER2 scFv that binds domain IV of HER2, e.g., comprising an anti-HER2 scFv sequence disclosed in Tables 3A-3C. In some embodiments, the second antigen binding domain comprises an anti-HER2 binding domain that binds domain I of HER2, e.g., an anti-HER2 antibody molecule (e.g., an IgG antibody) that binds domain I of HER2, comprising an anti-HER2 CDR, VH, VL, HC, and/or LC sequence as provided in Tables 3A-3C.

[1063] In some embodiments, the first antigen binding domain (e.g., an antibody mimetic, e.g., a designed ankyrin repeat protein (DARPIN)) is located at the N-terminus of the VL of the second binding domain (e.g., a full antibody, e.g., an IgG antibody), e.g., linked via a peptide linker. In some embodiments, a polypeptide of the bispecific antibody molecule comprises the following sequences, from N-terminal to C-terminal: an antibody mimetic, e.g., a designed ankyrin repeat protein (DARPIN), a peptide linker (e.g., a (G4S)3 linker (SEQ ID NO: 4537)), VL of the second binding domain and CL. In some embodiments, a polypeptide of the bispecific antibody molecule comprises the following sequences: from N-terminal to C-terminal: VH of the second binding domain, CH1, CH2, and CH3. In some embodiments, the bispecific antibody molecule comprises an Fc region that is mutated to have reduced binding to Fc receptor or reduced ADCC, e.g., an Fc region having the mutations L235V, F243L, R292P, Y300L, and P396L, numbered according to the EU index as in Kabat. In some embodiments, the first antigen binding fragment comprises an anti-HER2 binding domain that binds domain I of HER2, e.g., an anti-HER2 antibody mimetic, e.g., DARPIN that binds domain I of HER2, e.g., comprising an anti-HER2 antibody mimetic, e.g., DARPIN, sequence disclosed in Tables 3A-3C. In some embodiments, the second antigen binding domain comprises an anti-HER2 binding domain that binds domain IV of HER2, e.g., an anti-HER2 antibody molecule (e.g., an IgG antibody) that binds domain IV of HER2, comprising an anti-HER2 CDR, VH, VL, HC, and/or LC sequence as provided in Tables 3A-3C.

[1064] In some embodiments, the first antigen binding domain (e.g., a Fyn SH3-derived binding polypeptide (e.g., a fynomer)) is located at the N-terminus of the VL of the second binding domain (e.g., a full antibody, e.g., an IgG antibody), e.g., linked via a peptide linker. In some embodiments, a polypeptide of the bispecific antibody molecule comprises the following sequences, from N-terminal to C-terminal: a Fyn SH3-derived binding polypeptide, a peptide linker (e.g., a (G4S)3 linker (SEQ ID NO: 4537)), VL of the second binding domain and CL. In some embodiments, a polypeptide of the bispecific antibody molecule comprises the following sequences: from N-terminal to C-terminal: VH of the second binding domain, CH1, CH2, and CH3. In some embodiments, the bispecific antibody molecule comprises an Fc region that is mutated to have reduced binding to Fc receptor or reduced ADCC, e.g., an Fc region having the mutations L235V, F243L, R292P, Y300L, and P396L, numbered according to the EU index as in Kabat. In some embodiments, the first antigen binding fragment comprises an anti-HER2 binding domain that binds domain I of HER2, e.g., a Fyn SH3-derived binding polypeptide that binds domain I of HER2, e.g., comprising a Fyn SH3-derived binding polypeptide sequence disclosed in Table 3A. In some embodiments, the second antigen binding domain comprises an anti-HER2 binding domain that binds domain IV of HER2, e.g., an anti-HER2 antibody molecule (e.g., an IgG antibody) that binds domain IV of HER2, comprising an anti-HER2 CDR, VH, VL, HC, and/or LC sequence as provided in Tables 3A-3C. In some embodiments, the second antigen binding domain comprises an anti-HER2 binding domain that binds domain II of HER2, e.g., an anti-HER2 antibody molecule (e.g., an IgG antibody) that binds domain II of HER2, comprising an anti-HER2 CDR, VH, VL, HC, and/or LC sequence as provided in Table 3A.

[1065] In a further aspect, the invention relates to a bispecific molecule comprising a first antigen binding site from a HER2 antibody of the invention as described herein above and a second antigen binding site with a different binding specificity, such as a binding specificity for a human effector cell, a human Fc receptor, a T cell receptor, a B cell receptor or a binding specificity for a non-overlapping epitope of HER2, e.g., a bispecific antibody wherein the first and second antigen binding sites do not cross-block each other for binding to HER2, e.g. when tested as described in Example 9.

[1066] Exemplary bispecific antibody molecules of the invention comprise (i) two antibodies, one with a specificity to HER2 and another to a second target that are conjugated together, (ii) a single antibody that has one chain or arm specific to HER2 and a second chain or arm specific to a second molecule, (iii) a single chain antibody that has specificity to HER2 and a second molecule, e.g., via two scFvs linked in tandem by an extra peptide linker; (iv) a dual-variable-domain antibody (DVD-Ig), where each light chain and heavy chain contains two variable domains in tandem through a short peptide linkage (Wu et al., Generation and Characterization of a Dual Variable Domain Immunoglobulin (DVD-Ig™) Molecule, In: Antibody Engineering, Springer Berlin Heidelberg (2010)); (v) a chemically-linked bispecific (Fab′).sub.2 fragment; (vi) a Tandab, which is a fusion of two single chain diabodies resulting in a tetravalent bispecific antibody that has two binding sites for each of the target antigens; (vii) a flexibody, which is a combination of scFvs with a diabody resulting in a multivalent molecule; (viii) a so called “dock and lock” molecule, based on the “dimerization and docking domain” in Protein Kinase A, which, when applied to Fabs, can yield a trivalent bispecific binding protein consisting of two identical Fab fragments linked to a different Fab fragment; (ix) a so-called Scorpion molecule, comprising, e.g., two scFvs fused to both termini of a human Fc-region; and (x) a diabody. In one embodiment, the bispecific antibody of the present invention is a diabody.

[1067] In one embodiment, the second molecule is a cancer antigen/tumor-associated antigen such as carcinoembryonic antigen (CEA), prostate specific antigen (PSA), RAGE (renal antigen), .alpha.-fetoprotein, CAMEL (CTL-recognized antigen on melanoma), CT antigens (such as MAGE-B5, -B6, -C2, -C3, and D; Mage-12; CT10; NY-ESO-1, SSX-2, GAGE, BAGE, MAGE, and SAGE), mucin antigens (e.g., MUC1, mucin-CA125, etc.), ganglioside antigens, tyrosinase, gp75, c-Met, C-myc, Mart1., MelanA, MUM-1, MUM-2, MUM-3, HLA-B7, Ep-CAM or a cancer-associated integrin, such as a5133 integrin. In another embodiment, the second molecule is a T cell and/or NK cell antigen, such as CD3 or CD16. In another embodiment, the second molecule is an angiogenic factor or other cancer-associated growth factor, such as a vascular endothelial growth factor, a fibroblast growth factor, epidermal growth factor, angiogenin or a receptor of any of these, particularly receptors associated with cancer progression (for instance another one of the HER receptors; HER1, HER3, or HER4). In one embodiment, the second antigen-binding site binds a different, preferably non-blocking, site on HER2 than the one bound by the antibody of the invention. For example, the second molecule may be derived from, or cross-block HER2-binding of, trastuzumab, pertuzumab, F5, or C1.

[1068] In some embodiments, the sequences of the encoded antibody molecules of the present disclosure can be generated from bispecific or heterodimeric antibody molecules produced using protocols known in the art; including but not limited to, for example, the “knob in a hole” approach described in, e.g., U.S. Pat. No. 5,731,168; the electrostatic steering Fc pairing as described in, e.g., WO 09/089004, WO 06/106905 and WO 2010/129304; Strand Exchange Engineered Domains (SEED) heterodimer formation as described in, e.g., WO 07/110205; Fab arm exchange as described in, e.g., WO 08/119353, WO 2011/131746, and WO 2013/060867; double antibody conjugate, e.g., by antibody cross-linking to generate a bi-specific structure using a heterobifunctional reagent having an amine-reactive group and a sulfhydryl reactive group as described in, e.g., U.S. Pat. No. 4,433,059; bispecific antibody determinants generated by recombining half antibodies (heavy-light chain pairs or Fabs) from different antibodies through cycle of reduction and oxidation of disulfide bonds between the two heavy chains, as described in, e.g., U.S. Pat. No. 4,444,878; trifunctional antibodies. e.g., three Fab′ fragments cross-linked through sulfhdryl reactive groups, as described in, e.g., U.S. Pat. No. 5,273,743; biosynthetic binding proteins, e.g., pair of scFvs cross-linked through C-terminal tails preferably through disulfide or amine-reactive chemical cross-linking, as described in, e.g., U.S. Pat. No. 5,534,254; bifunctional antibodies, e.g., Fab fragments with different binding specificities dimerized through leucine zippers (e.g., c-fos and c-jun) that have replaced the constant domain, as described in, e.g., U.S. Pat. No. 5,582,996; bispecific and oligospecific mono- and oligovalent receptors, e.g., VH-CH1 regions of two antibodies (two Fab fragments) linked through a polypeptide spacer between the CH1 region of one antibody and the VH region of the other antibody typically with associated light chains, as described in, e.g., U.S. Pat. No. 5,591,828; bispecific DNA-antibody conjugates, e.g., crosslinking of antibodies or Fab fragments through a double stranded piece of DNA, as described in, e.g., U.S. Pat. No. 5,635,602; bispecific fusion proteins, e.g., an expression construct containing two scFvs with a hydrophilic helical peptide linker between them and a full constant region, as described in, e.g., U.S. Pat. No. 5,637,481; multivalent and multispecific binding proteins, e.g., dimer of polypeptides having first domain with binding region of Ig heavy chain variable region, and second domain with binding region of Ig light chain variable region, generally termed diabodies (higher order structures are also disclosed creating bispecific, trispecific, or tetraspecific molecules, as described in, e.g., U.S. Pat. No. 5,837,242; minibody constructs with linked VL and VH chains further connected with peptide spacers to an antibody hinge region and CH3 region, which can be dimerized to form bispecific/multivalent molecules, as described in, e.g., U.S. Pat. No. 5,837,821; VH and VL domains linked with a short peptide linker (e.g., 5 or 10 amino acids) or no linker at all in either orientation, which can form dimers to form bispecific diabodies; trimers and tetramers, as described in, e.g., U.S. Pat. No. 5,844,094; String of VH domains (or VL domains in family members) connected by peptide linkages with crosslinkable groups at the C-terminus further associated with VL domains to form a series of FVs (or scFvs), as described in, e.g., U.S. Pat. No. 5,864,019; and single chain binding polypeptides with both a VH and a VL domain linked through a peptide linker are combined into multivalent structures through non-covalent or chemical crosslinking to form, e.g., homobivalent, heterobivalent, trivalent, and tetravalent structures using both scFV or diabody type format, as described in, e.g., U.S. Pat. No. 5,869,620. Additional exemplary multispecific and bispecific molecules and methods of making the same are found, for example, in U.S. Pat. Nos. 5,910,573, 5,932,448, 5,959,083, 5,989,830, 6,005,079, 6,239,259, 6,294,353, 6,333,396, 6,476,198, 6,511,663, 6,670,453, 6,743,896, 6,809,185, 6,833,441, 7,129,330, 7,183,076, 7,521,056, 7,527,787, 7,534,866, 7,612,181, US2002/004587A1, US2002/076406A1, US2002/103345A1, US2003/207346A1, US2003/211078A1, US2004/219643A1, US2004/220388A1, US2004/242847A1, US2005/003403A1, US2005/004352A1, US2005/069552A1, US2005/079170A1, US2005/100543A1, US2005/136049A1, US2005/136051A1, US2005/163782A1, US2005/266425A1, US2006/083747A1, US2006/120960A1, US2006/204493A1, US2006/263367A1, US2007/004909A1, US2007/087381A1, US2007/128150A1, US2007/141049A1, US2007/154901A1, US2007/274985A1, US2008/050370A1, US2008/069820A1, US2008/152645A1, US2008/171855A1, US2008/241884A1, US2008/254512A1, US2008/260738A1, US2009/130106A1, US2009/148905A1, US2009/155275A1, US2009/162359A1, US2009/162360A1, US2009/175851A1, US2009/175867A1, US2009/232811A1, US2009/234105A1, US2009/263392A1, US2009/274649A1, EP346087A2, WO00/06605A2, WO02/072635A2, WO04/081051A1, WO06/020258A2, WO2007/044887A2, WO2007/095338A2, WO2007/137760A2, WO2008/119353A1, WO2009/021754A2, WO2009/068630A1, WO91/03493A1, WO93/23537A1, WO94/09131A1, WO94/12625A2, WO95/09917A1, WO96/37621A2, WO99/64460A1. The contents of the above-referenced applications are incorporated herein by reference in their entireties.

[1069] In some embodiments, the encoded antibody molecule is a bispecific Fynomer-antibody fusion protein, e.g., it comprises a plurality of immunoglobulin variable domains sequences with one of more Fynomers fused to any of the light- or heavy-chain termini, wherein a first immunoglobulin variable domain sequence of the plurality has binding specificity for a first epitope and the Fynomer has binding specificity for a second epitope. In some embodiments, the first and second epitopes are on the same antigen, e.g., the same protein (or subunit of a multimeric protein). In some embodiments, the first and second epitopes overlap. In some embodiments, the first and second epitopes do not overlap. In some embodiments, the first and second epitopes are on different antigens, e.g., the different proteins (or different subunits of a multimeric protein). In some embodiments, the encoded anti-HER2 molecule is a multispecific Fynomer-antibody fusion molecule. Fynomers that bind a target of interest can routinely be selected using recombinant technology as described for example, in Grbulovski et al., J. Biol. Chem. 282(5) 3196-3204 (2007) and WO 2008/022759. Methods for forming Fynomer-antibody fusion proteins are known in the art including, for example, Brack et al. (2014), Mol Cancer Ther 13(8):2030-2039, US2017/0281768, US2015/0105285A1, WO2014/170063A1, WO2015/141862A1, WO2013/135588A1, U.S. Ser. No. 10/996,226B2, U.S. Pat. No. 9,989,536B2, U.S. Pat. No. 9,689,879B2, U.S. Pat. No. 9,513,296B2, U.S. Ser. No. 10/323,095B2, and U.S. Pat. No. 9,593,314B2.

[1070] This present disclosure provides in some embodiments, a nucleic acid (e.g., an isolated nucleic acid) comprising a transgene encoding a payload comprising any of the above antibody molecules and genetic elements, AAV vectors, and AAV particles comprising the same.

### Chimeric Antigen Receptors

[1071] In some embodiments, the nucleic acid comprises a transgene encoding a payload (e.g., an antibody molecule that can be used to generate a chimeric antigen receptor (CAR) or a cell expressing a CAR (e.g., a CAR-expressing cell). The CAR may comprise i) an extracellular antigen binding domain, ii) a transmembrane domain, and iii) an intracellular signaling domain (which may comprise one or both of a primary signaling domain and a costimulatory domain). The CAR may further comprise a leader sequence and/or a hinge sequence. In specific embodiments, the CAR construct comprises a scFv domain, wherein the scFv may be preceded by an optional leader sequence, and followed by an optional hinge sequence, a transmembrane region, and an intracellular signaling domain, e.g., wherein the domains are contiguous with and in the same reading frame to form a single fusion protein.

[1072] The antigen binding domain of the CAR can be any domain that binds to the antigen including but not limited to a monoclonal antibody, a polyclonal antibody, a recombinant antibody, a human antibody, a humanized antibody, and a functional fragment thereof, including but not limited to a single-domain antibody such as a heavy chain variable domain (VH), a light chain variable domain (VL) and a variable domain (VHH) of camelid derived nanobody, and to an alternative scaffold known in the art to function as antigen binding domain, such as a recombinant fibronectin domain, a T cell receptor (TCR), or a fragment there of, e.g., single chain TCR, and the like. In some instances, it is beneficial for the antigen binding domain to be derived from the same species in which the CAR will ultimately be used in. For example, for use in humans, it may be beneficial for the antigen binding domain of the CAR to comprise human or humanized residues for the antigen binding domain of an antibody or antibody fragment. In some embodiments, the antigen binding domain of the CAR is an scFv antibody fragment that is humanized compared to the murine sequence of the scFv from which it is derived.

[1073] In some embodiments, a CAR can be used in the treatment of disease categories which include for example, cancer, autoimmune disorders, B-cell mediated diseases, inflammatory diseases, neuronal disorders, cardiovascular disease and circulatory disorders, or infectious diseases.

### Payload Antibodies

[1074] In some embodiments, the nucleic acid molecule comprises a transgene encoding an antibody molecule that binds to HER2. In some embodiments, the encoded HER2 antibody molecule comprises at least one antigen-binding domain, e.g., a variable region or antigen binding fragment thereof, from an antibody molecule described herein, e.g., antibody molecule chosen from Ab-HER-04. Ab-HER-05, Ab-HER-10, Ab-HER-15, Ab-HER-42, Ab-HER-43, Ab-HER-46, Ab-HER-47, Ab-HER-53, Ab-HER-57, Ab-HER-62. Ab-HER-69, Ab-HER-73, Ab-HER-75, Ab-HER-77, Ab-HER-78, Ab-HER-82, Ab-HER-88, Ab-HER-89, Ab-HER-90, Ab-HER-91, Ab-HER-92, Ab-HER-97, Ab-HER-98, Ab-HER-99. Ab-HER-100, or Ab-HER-101. e.g., as described in Tables 3A-3B, or a sequence substantially identical (e.g., having at least about 70%, 75%, 80%, 85%, 90%, 92%, 95%, 97%, 98%, or 99% sequence identity) to any of the aforesaid sequences.

[1075] In some embodiments, the nucleotide sequence encoding HER2 antibody molecule comprises the nucleotide sequence of at least one antigen-binding domain, e.g., a variable region or antigen binding fragment thereof, from an antibody molecule described herein, e.g., antibody molecule chosen from Ab-HER-04, Ab-HER-05, Ab-HER-10, Ab-HER-15, Ab-HER-42, Ab-HER-43, Ab-HER-46, Ab-HER-47, Ab-HER-53, Ab-HER-57, Ab-HER-62, Ab-HER-69, Ab-HER-73, Ab-HER-75, Ab-HER-77, Ab-HER-78, Ab-HER-82, Ah-HER-88, Ah-HER-89, Ab-HER-90, Ah-1HER-91, Ab-HER-92, Ah-HER-97, Ab-HER-98, Ab-HER-99, Ab-HER-100, or Ab-HER-101, e.g., as described in Tables 3A-3C, or a nucleotide sequence substantially identical (e.g., having at least about 70%, 75%, 80%, 85%, 90%, 92%, 95%, 97%, 98%, or 99% sequence identity) to any of the aforesaid sequences.

[1076] In some embodiments, the encoded anti-HER2 molecule comprises at least one, two, three, or four variable regions from an antibody molecule described herein, e.g., an antibody molecule chosen from Table 3A, 3B, or 3C, e.g., an antibody molecule chosen from Ab-HER-04, Ab-HER-05, Ab-HER-10, Ab-HER-15, Ab-HER-42, Ab-HER-43, Ab-HER-46, Ab-HER-47, Ab-HER-53, Ab-HER-57, Ab-HER-62, Ab-HER-69. Ab-HER-73, Ab-HER-75, Ab-HER-77, Ab-HER-78, Ab-HER-82, Ab-HER-88, Ab-HER-89, Ab-HER-90, Ab-HER-91, Ab-HER-92, Ab-HER-97, Ab-HER-98, Ab-HER-99, Ab-HER-100, or Ab-HER-101, e.g., as described in Tables 3A-3C, or a sequence substantially identical (e.g., having at least about 70%, 75%, 80%, 85%, 90%, 92%, 95%, 97%, 98%, or 99% sequence identity) to any of the aforesaid sequences.

[1077] In some embodiments, the nucleotide sequence encoding the anti-HER2 molecule comprises the nucleotide sequence of at least one, two, three, or four variable regions from an antibody molecule described herein, e.g., an antibody molecule chosen from Table 3A, 3B, 3C, e.g., an antibody molecule chosen from Ab-HER-04, Ab-HER-05, Ab-HER-10, Ab-HER-15, Ab-HER-42, Ab-HER-43, Ab-HER-46, Ab-HER-47, Ab-HER-53, Ab-HER-57, Ab-HER-62, Ab-HER-69, Ab-HER-73, Ab-HER-75. Ab-HER-77, Ab-HER-78, Ab-HER-82, Ab-HER-88, Ab-HER-89, Ab-HER-90, Ab-HER-91, Ab-HER-92, Ab-HER-97. Ab-HER-98, Ab-HER-99, Ab-HER-100, or Ab-HER-101, e.g., as described in Tables 3A-3C, or a nucleotide sequence substantially identical (e.g., having at least about 70%, 75%, 80%, 85%, 90%, 92%, 95%, 97%, 98%, or 99% sequence identity) to any of the aforesaid sequences.

[1078] In some embodiments, the encoded anti-HER2 molecule comprises a heavy chain variable region from an antibody molecule described herein, e.g., chosen from Ab-HER-04, Ab-HER-05, Ab-HER-10, Ab-HER-15. Ab-HER-42, Ab-HER-43, Ab-HER-46, Ab-HER-47, Ab-HER-53, Ab-HER-57, Ab-HER-62, Ab-HER-69, Ab-HER-73, Ab-HER-75, Ab-HER-77, Ab-HER-78, Ab-HER-82, Ab-HER-88. Ab-HER-89, Ab-HER-90, Ab-HER-91, Ab-HER-92, Ab-HER-97, Ab-HER-98, Ab-HER-99, Ab-HER-100, or Ab-HER-101, e.g., as described in Tables 3A-3C, or a sequence substantially identical (e.g., having at least about 70%, 75%, 80%, 85%, 90%, 92%, 95%, 97%, 98%, or 99% sequence identity) to any of the aforesaid sequences.

[1079] In some embodiments, the nucleotide sequence encoding the anti-HER2 molecule comprises the nucleotide sequence of a heavy chain variable region from an antibody molecule described herein, e.g., chosen from Ab-HER-04, Ab-HER-05, Ab-HER-10, Ab-HER-15, Ab-HER-42, Ab-HER-43, Ab-HER-46, Ab-HER-47, Ab-HER-53, Ab-HER-57, Ab-HER-62, Ab-HER-69, Ab-HER-73, Ab-HER-75. Ab-HER-77, Ab-HER-78, Ab-HER-82, Ab-HER-88, Ab-HER-89, Ab-HER-90, Ab-HER-91, Ab-HER-92, Ab-HER-97. Ab-HER-98, Ab-HER-99, Ab-HER-100, or Ab-HER-101, e.g., as described in Tables 3A-3C, or a nucleotide sequence substantially identical (e.g., having at least about 70%, 75%, 80%, 85%, 90%, 92%, 95%, 97%, 98%, or 99% sequence identity) to any of the aforesaid sequences.

[1080] In some embodiments, the encoded anti-HER2 molecule comprises a light chain variable region from an antibody molecule described herein, e.g., chosen from Ab-HER-04, Ab-HER-05, Ab-HER-10, Ab-HER-15. Ab-HER-42, Ab-HER-43, Ab-HER-46, Ab-HER-47, Ab-HER-53, Ab-HER-57, Ab-HER-62, Ab-HER-69, Ab-HER-73, Ab-HER-75, Ab-HER-77, Ab-HER-78, or Ab-HER-82, e.g., as described in Table 3A, or a sequence substantially identical (e.g., having at least about 70%, 75%, 80%, 85%, 90%, 92%, 95%, 97%, 98%, or 99% sequence identity) to any of the aforesaid sequences.

[1081] In some embodiments, the nucleic acid encoding the anti-HER2 molecule comprises the nucleotide sequence of a light chain variable region from an antibody molecule described herein, e.g., chosen from Ab-HER-04, Ab-HER-05, Ab-HER-10, Ab-HER-15, Ab-HER-42, Ab-HER-43, Ab-HER-46, Ab-HER-47, Ab-HER-53, Ab-HER-57, Ab-HER-62, Ab-HER-69, Ab-HER-73, Ab-HER-75, Ab-HER-77, Ab-HER-78, or Ab-HER-82, e.g., as described in Table 3A, or a nucleotide sequence substantially identical (e.g., having at least about 70%, 75%, 80%, 85%, 90%, 92%, 95%, 97%, 98%, or 99% sequence identity) to any of the aforesaid sequences.

[1082] In some embodiments, the encoded anti-HER2 antibody molecule comprises a heavy chain constant region, e.g., a human IgG1 constant region or a murine IgG2A. In some embodiments, the encoded heavy chain constant comprises an amino acid sequence set forth in Table 20, or a sequence substantially identical (e.g., having at least about 70%, 75%, 80%, 85%, 90%, 92%, 95%, 97%, 98%, or 99% sequence identity) to any of the aforesaid sequences. In some embodiments, nucleic acid encoding the heavy chain constant region comprises a nucleotide sequence set forth in Table 20, or a nucleotide sequence substantially identical (e.g., having at least about 70%, 75%, 80%, 85%, 90%, 92%, 95%, 97%, 98%, or 99% sequence identity) to any of the aforesaid sequences.

[1083] In some embodiments, the encoded anti-HER2 antibody molecule comprises a kappa light chain constant region, e.g., a human kappa light chain constant region or a murine kappa light chain constant region. In some embodiments, the encoded light chain constant comprises an amino acid sequence set forth in Table 20, or a sequence substantially identical (e.g., having at least about 70%, 75%, 80%, 85%, 90%, 92%, 95%, 97%, 98%, or 99% sequence identity) to any of the aforesaid sequences. In some embodiments, nucleic acid encoding the light chain constant region comprises a nucleotide sequence set forth in Table 20, or a nucleotide sequence substantially identical (e.g., having at least about 70%, 75%, 80%, 85%, 90%, 92%, 95%, 97%, 98%, or 99% sequence identity) to any of the aforesaid sequences.

[1084] In some embodiments, the encoded anti-HER2 antibody molecule comprises a heavy chain constant region of an IgG1, e.g., a human IgG1, and a kappa light chain constant region, e.g. a human kappa light chain constant region, e.g., a heavy and light chain constant region comprising an amino acid sequence set forth in Table 20, or a sequence substantially identical (e.g., having at least about 80%, 85%, 90%, 92%, 95%, 97%, 98%, or 99% sequence identity) thereto. In some embodiments, the nucleotide sequence encoding the anti-HER2 antibody comprises the nucleotide sequence of a heavy chain constant region of an IgG1 (e.g., human IgG1) and the nucleotide sequence of a kappa light chain constant region (e.g., a human kappa light chain constant region) comprising a nucleotide sequence set forth in Table 20, or a nucleotide sequence substantially identical (e.g., having at least about 80%, 85%, 90%, 92%, 95%, 97%, 98%, or 99% sequence identity) thereto.

[1085] In some embodiments, the encoded anti-HER2 antibody molecule comprises an Fc region or a variant thereof, e.g., as provided in Table 20. In some embodiments, the Fc region has reduced, e.g., ablated, affinity for an Fc receptor, e.g., an Fc receptor described herein. In some embodiments, the reduced affinity is compared to an otherwise similar antibody with a wild type Fc region. In some embodiments, the Fc receptor comprises a mutation at one or more of (e.g., all of) positions I253 (e.g., I253A), H310 (e.g., H310A or H310Q), and/or H435 (e.g., H435A or H435Q), numbered according to the EU index as in Kabat. In some embodiments, a bispecific antibody molecule described herein comprises a variant Fc region with reduced effector function (e.g., reduced ADCC). In some embodiments, the Fc region comprises a mutation at one or more of (e.g., all of) positions L235 (e.g., L235V), F243 (e.g., F243L), R292 (e.g., R292P), Y300 (e.g., Y300L), and P396 (e.g., P396L), numbered according to the EU index as in Kabat.

[1086] In some embodiments, the encoded HER2 antibody molecule comprises a heavy chain variable region and a constant region, a light chain variable region and a constant region, or both, comprising an amino acid sequence of Tables 3A-3C and Table 20; or is encoded by a nucleotide sequence of Tables 3A-3C and Table 20; or a sequence substantially identical (e.g., having at least about 80%, 85%, 90%, 92%, 95%, 97%, 98%, or 99% sequence identity) to any of the aforesaid sequences.

[1087] In some embodiments, the encoded HER2 antibody molecule comprises a heavy chain, light chain, or both a heavy chain and a light chain from an antibody molecule described herein, e.g., chosen from Ab-HER-04, Ab-HER-05, Ab-HER-10, Ab-HER-15, Ab-HER-42, Ab-HER-43, Ab-HER-46, Ab-HER-47, Ah-HER-53, Ah-HER-57, Ah-HER-62, Ab-HER-69, Ah-HER-73, Ah-HER-75, Ah-HER-77, Ab-HER-78, Ab-HER-82, Ab-HER-88, Ab-HER-89, Ab-HER-90, Ab-HER-91, Ab-HER-92, Ab-HER-97, Ab-HER-98, Ab-HER-99, Ab-HER-100, or Ab-HER-101, e.g., as described in Tables 3A-3C, or a sequence substantially identical (e.g., having at least about 70%, 75%, 80%, 85%, 90%, 92%, 95%, 97%, 98%, or 99% sequence identity) to any of the aforesaid sequences.

[1088] In some embodiments, the nucleic acid encoding HER2 antibody molecule comprises the nucleotide sequence of a heavy chain, light chain, or both a heavy chain and a light chain from an antibody molecule described herein, e.g., chosen from Ab-HER-04, Ab-HER-05, Ab-HER-10, Ab-HER-15, Ab-HER-42, Ab-HER-43, Ab-HER-46, Ab-HER-47, Ab-HER-53, Ab-HER-57, Ab-HER-62. Ab-HER-69, Ab-HER-73, Ab-HER-75, Ab-HER-77, Ab-HER-78, or Ab-HER-82, Ab-HER-88, Ab-HER-89, Ab-HER-90. Ab-HER-91, Ab-HER-92, Ab-HER-97, Ab-HER-98, Ab-HER-99, Ab-HER-100, or Ab-HER-101, e.g., as described in Tables 3A-3C, or a nucleotide sequence substantially identical (e.g., having at least about 70%, 75%, 80%, 85%, 90%, 92%, 95%, 97%, 98%, or 99% sequence identity) to any of the aforesaid sequences.

[1089] In some embodiments, the encoded anti-HER2 molecule comprises at least one, two, or three complementarity determining regions (CDRs) from a heavy chain variable region comprising an amino acid sequence in Tables 3A-3C, or is encoded by a nucleotide sequence in Tables 3A-3C; or a sequence substantially identical (e.g., having at least about 80%, 85%, 90%, 92%, 95%, 97%, 98%, or 99% sequence identity) to any of the aforesaid sequences. In some embodiments, one or more of the CDRs (or collectively all of the CDRs) have one, two, three, four, five or more changes, e.g., amino acid substitutions, insertions, or deletions, relative to the amino acid sequence shown in Tables 3A-3C, or encoded by a nucleotide sequence shown in Tables 3A-3C. In certain embodiments, the encoded anti-HER2 antibody molecule includes a substitution in a heavy chain CDR, e.g., one or more substitutions in a CDR1, CDR2 and/or CDR3 of the heavy chain. In some embodiments, the CDRs are according to the Kabat definition (e.g., as set out in Tables 3A-3C). In some embodiments, the CDRs are according to the Chothia definition (e.g., as set out in Table 3A).

[1090] In some embodiments, the encoded anti-HER2 molecule comprises at least one, two, or three complementarity determining regions (CDRs) from a light chain variable region comprising an amino acid sequence in Table 3A, or is encoded by a nucleotide sequence in Table 3A; or a sequence substantially identical (e.g., having at least about 80%, 85%, 90%, 92%, 95%, 97%, 98%, or 99% sequence identity) to any of the aforesaid sequences. In some embodiments, one or more of the CDRs (or collectively all of the CDRs) have one, two, three, four, five or more changes, e.g., amino acid substitutions, insertions, or deletions, relative to the amino acid sequence shown in Table 3A, or encoded by a nucleotide sequence shown in Table 3A. In certain embodiments, the encoded anti-HER2 antibody molecule includes a substitution in a light chain CDR, e.g., one or more substitutions in a CDR1, CDR2 and/or CDR3 of the heavy chain. In some embodiments, the CDRs are according to the Kabat definition (e.g., as set out in Tables 3A-3C). In some embodiments, the CDRs are according to the Chothia definition (e.g., as set out in Table 3A).

[1091] In some embodiments, the encoded anti-HER2 antibody molecule comprises at least one, two, three, four, five or six CDRs (or collectively all of the CDRs) from a heavy and light chain variable region comprising an amino acid sequence shown in Tables 3A-3C, or is encoded by a nucleotide sequence shown in Tables 3A-3C. In some embodiments, one or more of the CDRs (or collectively all of the CDRs) have one, two, three, four, five, six or more changes, e.g., amino acid substitutions (e.g., conservative substitutions), insertions, or deletions, relative to the CDRs shown in Tables 3A-3C, or encoded by a nucleotide sequence shown in Tables 3A-3C. In some embodiments, the CDRs are according to the Kabat definition (e.g., as set out in Tables 3A-3C). In some embodiments, the CDRs are according to the Chothia definition (e.g., as set out in Table 3A).

[1092] In some embodiments, the encoded anti-HER2 antibody molecule comprises all three CDRs from a heavy chain variable region, all three CDRs from light chain variable region, or both (e.g., all six CDRs from a heavy chain variable region and a light chain variable region) comprising an amino acid sequence shown in Tables 3A-3C, or is encoded by a nucleotide sequence shown in Tables 3A-3C. In some embodiments, the CDRs are according to the Kabat definition (e.g., as set out in Tables 3A-3C). In some embodiments, the CDRs are according to the Chothia definition (e.g., as set out in Table 3A).

[1093] In some embodiments, the encoded anti-HER2 antibody comprises a heavy chain complementary determining region 1 (HC CDR1), a HC CDR2, and a HC CDR3, wherein the HC CDR1, HC CDR2, and HC CDR3 sequences comprise the sequences of SEQ ID NO: 5037, 5038, and 5039, respectively. In some embodiments, the encoded anti-HER2 antibody comprises a LC CDR1, a LC CDR2 and an LC CDR3, wherein the LC CDR1, LC CDR2, and LC CDR3 sequences comprise the sequences of SEQ ID NO: 5043, 5044, and 5045, respectively. In some embodiments, the encoded anti-HER2 antibody comprises HC CDR1, a HC CDR2, a HC CDR3, a LC CDR1, a LC CDR2 and an LC CDR3, wherein the HC CDR1, HC CDR2, HC CDR3, LC CDR1, LC CDR2, and LC CDR3 sequences comprise the sequences of SEQ ID NO: 5037, 5038, 5039, 5043, 5044, and 5045, respectively. In some embodiments, one or more of the CDRs (or collectively all of the CDRs) have one, two, three, four, five, six or more changes, e.g., amino acid substitutions (e.g., conservative substitutions), insertions, or deletions, relative to SEQ ID NO: 5043, 5044, 5045, 5037, 5038, 5039, 5043, 5044, and 5045. In some embodiments, an antibody molecule described herein has one, two, three or four changes, e.g., substitutions, relative to SEQ ID NO: 5039.

[1094] In some embodiments, the encoded anti-HER2 antibody molecule comprises a heavy chain complementary determining region 1 (HC CDR1), a HC CDR2, and a HC CDR3, wherein the HC CDR1, HC CDR2, and HC CDR3 sequences comprise the sequences of SEQ ID NO: 5179, 5180, and 5181, respectively. In some embodiments, the encoded anti-HER2 antibody molecule comprises a LC CDR1, a LC CDR2 and an LC CDR3, wherein the LC CDR1, LC CDR2, and LC CDR3 sequences comprise the sequences of SEQ ID NO: 5182, 5183, and 5184, respectively. In some embodiments, the encoded anti-HER2 antibody molecule comprises HC CDR1, a HC CDR2, a HC CDR3, a LC CDR1, a LC CDR2 and an LC CDR3, wherein the HC CDR1, HC CDR2, HC CDR3, LC CDR1, LC CDR2, and LC CDR3 sequences comprise the sequences of SEQ ID NO: 5179, 5180, 5181, 5182, 5183, and 5184, respectively.

[1095] In some embodiments, the encoded anti-HER2 antibody molecule comprises a heavy chain complementary determining region 1 (HC CDR1), a HC CDR2, and a HC CDR3, wherein the HC CDR1, HC CDR2, and HC CDR3 sequences comprise the sequences of SEQ ID NO: 5053, 5054, and, 5055, respectively. In some embodiments, the encoded anti-HER2 antibody molecule comprises a LC CDR1, a LC CDR2 and an LC CDR3, wherein the LC CDR1, LC CDR2, and LC CDR3 sequences comprise the sequences of SEQ ID NO: 5059, 5060, and 5061, respectively. In some embodiments, the encoded anti-HER2 antibody molecule comprises HC CDR1, a HC CDR2, a HC CDR3, a LC CDR1, a LC CDR2 and an LC CDR3, wherein the HC CDR1, HC CDR2, HC CDR3, LC CDR1, LC CDR2, and LC CDR3 sequences comprise the sequences of SEQ ID NO: 5053, 5054, 5055, 5059, 5060, and 5061, respectively.

[1096] In some embodiments, the encoded anti-HER2 antibody molecule comprises HC CDR1, a HC CDR2, a HC CDR3, a LC CDR1, a LC CDR2 and/or an LC CDR3, wherein the HC CDR1, HC CDR2, HC CDR3, LC CDR1, LC CDR2, and LC CDR3 sequences comprise the sequences of SEQ ID NO: 5117, 5118, 5119 5123, 5124, and 5125, respectively. In some embodiments, the encoded anti-HER2 antibody molecule comprises HC CDR1, a HC CDR2, a HC CDR3, a LC CDR1, a LC CDR2 and/or an LC CDR3, wherein the HC CDR1, HC CDR2, HC CDR3, LC CDR1, LC CDR2, and LC CDR3 sequences comprise the sequences of SEQ ID NO: 5120, 5121, 5122; 5126, 5127, and 5128, respectively.

[1097] In some embodiments, the encoded anti-HER2 antibody molecule comprises HC CDR1, a HC CDR2, a HC CDR3, a LC CDR1, a LC CDR2 and/or an LC CDR3, wherein the HC CDR1, HC CDR2, HC CDR3, LC CDR1, LC CDR2, and LC CDR3 sequences comprise the sequences of SEQ ID NO: 5281, 5282, 5283, 5287, 5288, and 5289, respectively. In some embodiments, the encoded anti-HER2 antibody molecule comprises HC CDR1, a HC CDR2, a HC CDR3, a LC CDR1, a LC CDR2 and/or an LC CDR3, wherein the HC CDR1, HC CDR2, HC CDR3, LC CDR1, LC CDR2, and LC CDR3 sequences comprise the sequences of SEQ ID NO: 5284, 5285, 5286, 5287, 5291, and 5292, respectively.

[1098] In some embodiments, the encoded anti-HER2 antibody molecule comprises HC CDR1, a HC CDR2, a HC CDR3, a LC CDR1, a LC CDR2 and/or an LC CDR3, wherein the HC CDR1, HC CDR2, HC CDR3, LC CDR1, LC CDR2, and LC CDR3 sequences comprise the sequences of SEQ ID NO: 5281, 5282, 6510, 5287, 5288, and 5289, respectively.

[1099] In some embodiments, the encoded anti-HER2 antibody molecule comprises HC CDR1, a HC CDR2, a HC CDR3, a LC CDR1, a LC CDR2 and/or an LC CDR3, wherein the HC CDR1, HC CDR2, HC CDR3, LC CDR1, LC CDR2, and LC CDR3 sequences comprise the sequences of SEQ ID NO: 5281, 5282, 6515, 5287, 5288, and 5289, respectively.

[1100] In some embodiments, the encoded anti-HER2 antibody molecule comprises HC CDR1, a HC CDR2, a HC CDR3, a LC CDR1, a LC CDR2 and/or an LC CDR3, wherein the HC CDR1, HC CDR2, HC CDR3, LC CDR1, LC CDR2, and LC CDR3 sequences comprise the sequences of SEQ ID NO: 5281, 5282, 6520, 5287, 5288, and 5289, respectively.

[1101] In some embodiments, the encoded anti-HER2 antibody molecule comprises HC CDR1, a HC CDR2, a HC CDR3, a LC CDR1, a LC CDR2 and/or an LC CDR3, wherein the HC CDR1, HC CDR2, HC CDR3, LC CDR1, LC CDR2, and LC CDR3 sequences comprise the sequences of SEQ ID NO: 5281, 5282, 6525, 5287, 5288, and 5289, respectively.

[1102] In some embodiments, the encoded anti-HER2 antibody molecule comprises HC CDR1, a HC CDR2, a HC CDR3, a LC CDR1, a LC CDR2 and/or an LC CDR3, wherein the HC CDR1, HC CDR2, HC CDR3, LC CDR1, LC CDR2, and LC CDR3 sequences comprise the sequences of SEQ ID NO: 5281, 5282, 6530, 5287, 5288, and 5289, respectively.

[1103] In some embodiments, the encoded anti-HER2 antibody molecule comprises a heavy chain variable region comprising the amino acid sequence of SEQ ID NO: 5001, 5367, 5172, 5106, 5010, 5069, 5192, 5224, 5090, 5110, 5254, 5258, 5130, 5262, 5270, 5326, 6511, 6516, 6521, 6526, 6531, 6536, 6539, 6542, 6545, or 6548; or encoded by the nucleotide sequence of SEQ ID NO: 5002, 5171, 5105, 5009, 5068, 5191, 5223, 5089, 5109, 5253, 5257, 5129, 5261, 5269, 5330, 6512, 6517, 6522, 6527, 6532, 6537, 6540, 6543, 6546, or 6549; or a sequence substantially identical (e.g., having at least about 80%, 85%, 90%, 92%, 95%, 97%, 98%, or 99% sequence identity) to any of the aforesaid sequences.

[1104] In some embodiments, an encoded anti-HER2 antibody molecule described herein comprises a heavy chain variable region comprising one, two, three or all of an amino acid other than D at position 102, an amino acid other than M at position 107, an amino acid other than D at position 108, and/or an amino acid other than Y at position 109, relative to a reference sequence numbered according to the amino acid sequence of SEQ ID NO: 5001. In some embodiments, the anti-HER2 antibody molecule comprises one, two, three or all of the amino acid W at position 102, the amino acid F at position 107, A at position 108, and/or L at position 109, relative to a reference sequence numbered according to the amino acid sequence of SEQ ID NO: 5001. In some embodiments, the anti-HER antibody molecule comprises the amino acid W at position 102, the amino acid F at position 107, the amino acid A position 108, and the amino acid L at position 109, relative to a reference sequence numbered according to the amino acid sequence of SEQ ID NO: 5001. In some embodiments, the anti-HER antibody molecule comprises the amino acid W at position 102, the amino acid F at position 107, and the amino acid A position 108, relative to a reference sequence numbered according to the amino acid sequence of SEQ ID NO: 5001. In some embodiments, the anti-HER antibody molecule comprises the amino acid W at position 102, the amino acid F at position 107, and the amino acid L at position 109, relative to a reference sequence numbered according to the amino acid sequence of SEQ ID NO: 5001. In some embodiments, the anti-HER antibody molecule comprises the amino acid W at position 102, the amino acid A position 108, and the amino acid L at position 109, relative to a reference sequence numbered according to the amino acid sequence of SEQ ID NO: 5001. In some embodiments, the anti-HER antibody molecule comprises the amino acid F at position 107, the amino acid A position 108, and the amino acid L at position 109, relative to a reference sequence numbered according to the amino acid sequence of SEQ ID NO: 5001.

[1105] In some embodiments, an encoded anti-HER2 antibody molecule described herein comprises a heavy chain variable region comprising an amino acid substitution at one, two, three, or all of positions 102 (e.g., D102W), 107 (e.g., M107F), 108 (e.g., D108A), and/or 109 (e.g., Y109L), relative to a reference sequence numbered according to the amino acid sequence of SEQ ID NO: 5001. In some embodiments, the anti-HER2 antibody molecule comprises the amino acid substitutions D102W, M107F, D108A, and Y109L, relative to a reference sequence numbered according to the amino acid sequence of SEQ ID NO: 5001. In some embodiments, the anti-HER2 antibody molecule comprises the amino acid substitutions D102W, M107F, and D108A, relative to a reference sequence numbered according to the amino acid sequence of SEQ ID NO: 5001. In some embodiments, the anti-HER2 antibody molecule comprises the amino acid substitutions D102W, M107F, and Y109L, relative to a reference sequence numbered according to the amino acid sequence of SEQ ID NO: 5001. In some embodiments, the anti-HER2 antibody molecule comprises the amino acid substitutions D102W, D108A. and Y109L, relative to a reference sequence numbered according to the amino acid sequence of SEQ ID NO: 5001. In some embodiments, the anti-HER2 antibody molecule comprises the amino acid substitutions M107F, D108A, and Y109L, relative to a reference sequence numbered according to the amino acid sequence of SEQ ID NO: 5001.

[1106] In some embodiments, an encoded anti-HER2 antibody described herein comprises a heavy chain variable region comprising an amino acid substitution at one, two, three, or all of positions, 98 (e.g., D98W), 100 (e.g., M100F), 101 (e.g., D101A), and/or 102 (e.g., Y102L), of the CDR3 region according to Kabat numbering (e.g., as shown in Moon et al., Mol. Cells 39(3): 217-228 (2016), which is hereby incorporated by reference in its entirety). In some embodiments, the anti-HER2 antibody molecule comprises the amino acid substitutions D98W, M100F, D101A, and Y102L, numbered according to Kabat. In some embodiments, the anti-HER2 antibody molecule comprises the amino acid substitutions D98W, M100F, and D101A, numbered according to Kabat. In some embodiments, the anti-HER2 antibody molecule comprises the amino acid substitutions D98W, M100F, and Y102L, numbered according to Kabat. In some embodiments, the anti-HER2 antibody molecule comprises the amino acid substitutions D98W, D101A, and Y102L, numbered according to Kabat. In some embodiments, the anti-HER2 antibody molecule comprises the amino acid substitutions M100F, D101A, and Y102L, numbered according to Kabat.

[1107] In some embodiments, the encoded anti-HER2 antibody molecule comprises a light chain variable region comprising the amino acid sequence of SEQ ID NO: 5006, 5176, 5020, 5014, 5086, 5196, 5228, 5094, 5114, 5256, 5260, 5134, 5266, 5274, 5339, or 5354; or encoded by the nucleotide sequence of SEQ ID NO: 5005, 5175, 5019, 5013, 5085, 5195, 5227, 5094, 5113, 5255, 5259, 5133, 5265, 5273, 5340, or 5353; or a sequence substantially identical (e.g., having at least about 80%, 85%, 90%, 92%, 95%, 97%, 98%, or 99% sequence identity) to any of the aforesaid sequences.

[1108] In some embodiments, the encoded anti-HER2 antibody molecule comprises a heavy chain variable region and a light chain variable region comprising the amino acid sequences of SEQ ID NO: 5110 and 5114; or encoded by the nucleotide sequences of SEQ ID NO: 5109 and 5113; or a sequence substantially identical (e.g., having at least about 80%, 85%, 90%, 92%, 95%, 97%, 98%, or 99% sequence identity) to any of the aforesaid sequences.

[1109] In some embodiments, the encoded anti-HER2 antibody molecule comprises a heavy chain variable region comprising the amino acid sequence of SEQ ID NO: 5110; or encoded by the nucleotide sequence of SEQ ID NO: 5109; or a sequence substantially identical (e.g., having at least about 80%, 85%, 90%, 92%, 95%, 97%, 98%, or 99% sequence identity) to any of the aforesaid sequences. In some embodiments, the encoded anti-HER2 antibody molecule comprises a light chain variable region comprising the amino acid sequence of SEQ ID NO: 5114; or encoded by the nucleotide sequence of SEQ ID NO: 5113; or a sequence substantially identical (e.g., having at least about 80%, 85%, 90%, 92%, 95%, 97%, 98%, or 99% sequence identity) to any of the aforesaid sequences. In some embodiments, the encoded anti-HER2 antibody molecule comprises a heavy chain variable region and a light chain variable region comprising the amino acid sequences of SEQ ID NO: 5110 and 5114, respectively; or encoded by the nucleotide sequences of SEQ ID NO: 5109 and 5113, respectively; or a sequence substantially identical (e.g., having at least about 80%, 85%, 90%, 92%, 95%, 97%, 98%, or 99% sequence identity) to any of the aforesaid sequences.

[1110] In some embodiments, the encoded anti-HER2 antibody molecule comprises a heavy chain variable region and a light chain variable region comprising the amino acid sequences of SEQ ID NO: 5270 and 5274; or encoded by the nucleotide sequences of SEQ ID NO: 5269 and 5273; or a sequence substantially identical (e.g., having at least about 80%, 85%, 90%, 92%, 95%, 97%, 98%, or 99% sequence identity) to any of the aforesaid sequences.

[1111] In some embodiments, the encoded anti-HER2 antibody molecule comprises a heavy chain variable region comprising the amino acid sequence of SEQ ID NO: 5270; or encoded by the nucleotide sequence of SEQ ID NO: 5269; or a sequence substantially identical (e.g., having at least about 80%, 85%, 90%, 92%, 95%, 97%, 98%, or 99% sequence identity) to any of the aforesaid sequences. In some embodiments, the encoded anti-HER2 antibody molecule comprises a light chain variable region comprising the amino acid sequence of SEQ ID NO: 5274; or encoded by the nucleotide sequence of SEQ ID NO: 5273; or a sequence substantially identical (e.g., having at least about 80%, 85%, 90%, 92%, 95%, 97%, 98%, or 99% sequence identity) to any of the aforesaid sequences. In some embodiments, the encoded anti-HER2 antibody molecule comprises a heavy chain variable region and a light chain variable region comprising the amino acid sequences of SEQ ID NO: 5270 and 5274, respectively; or encoded by the nucleotide sequences of SEQ ID NO: 5269 and 5273, respectively; or a sequence substantially identical (e.g., having at least about 80%, 85%, 90%, 92%, 95%, 97%, 98%, or 99% sequence identity) to any of the aforesaid sequences.

[1112] In some embodiments, the encoded anti-HER2 antibody molecule comprises a heavy chain constant region comprising the amino acid sequence of SEQ ID NO: 5004, 5018, 5012, 5026, 5030, 5212, 5214, 5216, 5220, 5264, 5278, 5280, or 5345; or encoded by the nucleotide sequence of SEQ ID NO: 5005, 5017, 50121, 5025, 5029, 5211, 5213, 5215, 5219, 5263, 5277, 5279, or 5344; or a sequence substantially identical (e.g., having at least about 80%, 85%, 90%, 92%, 95%, 97%, 98%, or 99% sequence identity) to any of the aforesaid sequences. In some embodiments, the encoded anti-HER2 antibody molecule comprises a light chain constant region comprising the amino acid sequence of SEQ ID NO: 5008, 5022, 5218, or 5222; or encoded by the nucleotide sequence of SEQ ID NO: 5007, 5021, 5218, 5221, or 5346; or a sequence substantially identical (e.g., having at least about 80%, 85%, 90%, 92%, 95%, 97%, 98%, or 99% sequence identity) to any of the aforesaid sequences.

[1113] In some embodiments, the encoded anti-HER2 antibody molecule comprises a heavy chain comprising the amino acid sequence of SEQ ID NO: 5034, 5174, 5050, 5066, 5084, 5194, 5226, 5092, 5112, 5254, 5258, 5132, 5264, 5272, 5331, 6513, 6518, 6523, 6528, or 6533; or encoded by the nucleotide sequence of SEQ ID NO: 5033, 5173, 5049, 5065, 5083, 5193, 5225, 5091, 5111, 5253, 5257, 5131, 5263, 5271, 5332, 6514, 6519, 6524, 6529, or 6534; or a sequence substantially identical (e.g., having at least about 80%, 85%, 90%, 92%, 95%, 97%, 98%, or 99% sequence identity) to any of the aforesaid sequences. In some embodiments, the encoded anti-HER2 antibody comprises a light chain comprising the amino acid sequence of SEQ ID NO: 5036, 5178, 5052, 5068, 5088, 5198, 5230, 5096, 5116, 5136, 5268, 5276, 5341, or 5365; or encoded by the nucleotide sequence of SEQ ID NO: 5035, 5177, 5051, 5067, 5087, 5197, 5229, 5095, 5115, 5135, 5267, 5275, 5342, or 5366; or a sequence substantially identical (e.g., having at least about 80%, 85%, 90%, 92%, 95%, 97%, 98%, or 99% sequence identity) to any of the aforesaid sequences.

[1114] In some embodiments, the encoded anti-HER2 antibody molecule comprises a heavy chain and a light chain comprising the amino acid sequence of SEQ ID NO: 5112 and 5116, respectively; or encoded by the nucleotide sequence of SEQ ID NO: 5111 and 5115, respectively; or a sequence substantially identical (e.g., having at least about 80%, 85%, 90%, 92%, 95%, 97%, 98%, or 99% sequence identity) to any of the aforesaid sequences.

[1115] In some embodiments, the encoded anti-HER2 antibody molecule comprises a heavy chain and a light chain comprising the amino acid sequence of SEQ ID NO: 5272 and 5276, respectively; or encoded by the nucleotide sequence of SEQ ID NO: 5271 and 5275, respectively; or a sequence substantially identical (e.g., having at least about 80%, 85%, 90%, 92%, 95%, 97%, 98%, or 99% sequence identity) to any of the aforesaid sequences.

[1116] In some embodiments, the encoded HER-2 antibody molecule comprises an anti-HER2 antigen binding domain, e.g., an scFv, and an Fc region. In some embodiments, the encoded HER-2 antibody molecule comprises an anti-HER2 scFv fused to an Fc region. In some embodiments, the encoded HER-2 antibody molecule described herein comprises an Fc region that is mutated to have reduced binding to an Fc receptor or reduced ADCC. In some embodiments, the scFv comprises the amino acid sequence of SEQ ID NO: 5349, 5352, or is encoded by the nucleotide sequence of SEQ ID NO: 5350, 5351, 5364; a sequence substantially identical (e.g., having at least about 80%, 85%, 90%, 92%, 95%, 97%, 98%, or 99% sequence identity) to any of the aforesaid sequences. In some embodiments, the Fc region comprises the amino acid sequence of SEQ ID NO: 5278, or is encoded by the nucleotide sequence of SEQ ID NO: 5277; or a sequence substantially identical (e.g., having at least about 80%, 85%, 90%, 92%, 95%, 97%, 98%, or 99% sequence identity) to any of the aforesaid sequences.

[1117] In some embodiments, the encoded HER2 antibody molecule comprises VH, VL, scFv, heavy chain, and/or light chain encoded by a codon-optimized nucleotide sequence. Codon-optimization may be achieved by any method known to one with skill in the art such as, but not limited to, by a method according to Genescript, EMBOSS, Bioinformatics, NUS, NUS2, Geneinfinity, IDT, NUS3, GregThatcher, Insilico, Molbio, N2P, Snapgene, and/or VectorNTI.

[1118] In some embodiments, disclosed herein is an encoded an antibody molecule that competes for binding to HER2 with the aforesaid antibody molecules. In some embodiments, disclosed herein is an encoded antibody molecule that binds to the same epitope as, substantially the same epitope as, an epitope that overlaps with, or an epitope that substantially overlaps with, the epitope of the aforesaid anti-HER2 antibody molecules.

[1119] This present disclosure provides in some embodiments, a nucleic acid (e.g., an isolated nucleic acid) comprising a transgene encoding any of the above described antibody molecules and genetic elements, AAV vectors, AAV particles, and cells comprising the same.

TABLE 3A
Exemplary Anti-HER2 Antibodies

| | SEQ | | |
|---|---|---|---|
| Ab ID | ID NO | Description | Sequence |
| Ab-HER- | 5037 | HC CDR1 | DTYIH |
| 04 | | (Kabat) | |
| | 5038 | HC CDR2 | RIYPTNGYTRYADSVKG |
| | | (Kabat) | |
| | 5039 | HC CDR3 | WGGDGFYAMDY |
| | | (Kabat) | |
| | 5040 | HC CDR1 | GFNIKDT |
| | | (Chothia) | |
| | 5041 | HC CDR2 | YPTNGY |
| | | (Chothia) | |
| | 5042 | HC CDR3 | WGGDGFYAMDY |
| | | (Chothia) | |
| | 5001 | VH | EVQLVESGGGLVQPGGSLRLSCAASGFNIKDTYIHWVRQAPGKGLEWVAR |
| | | | IYPTNGYTRYADSVKGRFTISADTSKNTAYLQMNSLRAEDTAVYYCSRW |
| | | | GGDGFYAMDYWGQGTLVTVSS |
| | 5367 | VH | EVQLVESGGGLVQPGGSLRLSCAASGFNIKDTYIHWVRQAPGKGLEWVAR |
| | | | IYPTNGYTRYADSVKGRFTISADTSKNTAYLQMNSLRAEDTAVYYCSRW |
| | | | GGWGFYAFALWGQGTLVTVSS |
| | 5002 | DNA VH | gaggttcagctggtggagtctggcggtggcctggtgcagccagggggctc |
| | | | actccgtttgtcctgtgcagcttctggcttcaacattaaagacacctat |
| | | | atacactgggtgcgtcaggccccgggtaagggcctggaatgggttgcaa |
| | | | ggatttatcctacgaatggttatactagatatgccgatagcgtcaaggg |
| | | | ccgtttcactataagcgcagacacatccaaaaacacagcctacctgcag |
| | | | atgaacagcctgcgtgctgaggacactgccgtctattattgttctagat |
| | | | ggggaggggacggcttctatgctatggacTACtggggtcaaggaaccct |
| | | | ggtcaccgtctcctcg |
| | 5034 | Heavy Chain | EVQLVESGGGLVQPGGSLRLSCAASGFNIKDTYIHWVRQAPGKGLEWVAR |
| | | (hIgG1) | IYPTNGYTRYADSVKGRFTISADTSKNTAYLQMNSLRAEDTAVYYCSRWG |
| | | | GDGFYAMDYWGQGTLVTVSSASTKGPSVFPLAPSSKSTSGGTAALGCLVK |
| | | | DYFPEPVTVSWNSGALTSGVHTFPAVLQSSGLYSLSSVVTVPSSSLGTQT |
| | | | YICNVNHKPSNTKVDKKVEPPKSCDKTHTCPPCPAPELLGGPSVFLFPPK |
| | | | PKDTLMISRTPEVTCVVVDVSHEDPEVKFNWYVDGVEVHNAKTKPREEQY |
| | | | NSTYRVVSVLTVLHQDWLNGKEYKCKVSNKALPAPIEKTISKAKGQPREP |
| | | | QVYTLPPSRDELTKNQVSLTCLVKGFYPSDIAVEWESNGQPENNYKTTPP |
| | | | VLDSDGSFFLYSKLTVDKSRWQQGNVFSCSVMHEALHNHYTQKSLSLSPG |
| | | | K |
| | 5033 | DNA Heavy | gaggttcagctggtggagtctggcggtggcctggtgcagccagggggctc |
| | | Chain | actccgtttgtcctgtgcagcttctggcttcaacattaaagacacctata |
| | | (hIgG1) | tacactgggtgcgtcaggccccgggtaagggcctggaatgggttgcaagg |
| | | | atttatcctacgaatggttatactagatatgccgatagcgtcaagggccg |
| | | | tttcactataagcgcagacacatccaaaaacacagcctacctgcagatga |
| | | | acagcctgcgtgctgaggacactgccgtctattattgttctagatgggga |
| | | | ggggacggcttctatgctatggacTACtggggtcaaggaaccctggtcac |
| | | | cgtctcctcggcgtcgaccaagggcccatcggtcttccccctggcaccct |
| | | | cctccaagagcacctctgggggcacagcggccctgggctgcctggtcaag |
| | | | gactacttccccgaacctgtgacggtctcgtggaactcaggcgccctgac |
| | | | cagcggcgtgcacaccttcccggctgtcctacagtcctcaggactctact |
| | | | ccctcagcagcgtggtgaccgtgccctccagcagcttgggcacccagacc |
| | | | tacatctgcaacgtgaatcacaagcccagcaacaccaaggtggacaagaa |
| | | | agttgagcccCCCaaatcttgtgacaaaactcacacatgcccaccgtgcc |
| | | | cagcacctgaactcctggggggaccgtcagtcttcctcttccccccaaaa |
| | | | cccaaggacaccctcatgatctcccggacccctgaggtcacatgcgtggt |
| | | | ggtggacgtgagccacgaagaccctgaggtcaagttcaactggtacgtgg |
| | | | acggcgtggaggtgcataatgccaagacaaagccgcgggaggagcagtac |
| | | | aacagcacgtaccgtgtggtcagcgtcctcaccgtcctgcaccaggactg |
| | | | gctgaatggcaaggagtacaagtgcaaggtctccaacaaagccctcccag |
| | | | cccccatcgagaaaaccatctccaaagccaaagggcagccccgagaacca |
| | | | caggtgtacaccctgcccccatcccgggatgagctgaccaagaaccaggt |
| | | | cagcctgacctgcctggtcaaaggcttctatcccagcgacatcgccgtgg |
| | | | agtgggagagcaatgggcagccggagaacaactacaagaccacgcctccc |
| | | | gtgctggactccgacggctccttcttcctctacagcaagctcaccgtgga |
| | | | caagagcaggtggcagcaggggaacgtcttctcatgctccgtgatgcatg |
| | | | aggctctgcacaaccactacacgcagaagagcctctccctgtctccgggt |
| | | | aaa |
| | 5043 | LC CDR1 | RASQDVNTAVA |
| | | (Kabat) | |
| | 5044 | LC CDR2 | SASFLYS |
| | | (Kabat) | |
| | 5045 | LC CDR3 | QQHYTTPPT |
| | | (Kabat) | |
| | 5046 | LC CDR1 | RASQDVNTAVA |
| | | (Chothia) | |
| | 5047 | LC CDR2 | SASFLYS |
| | | (Chothia) | |
| | 5048 | LC CDR3 | QQHYTTPPT |
| | | (Chothia) | |
| | 5006 | VL | DIQMTQSPSSLSASVGDRVTITCRASQDVNTAVAWYQQKPGKAPKLLIYS |
| | | | ASFLYSGVPSRFSGSRSGTDFTLTISSLQPEDFATYYCQQHYTTPPTFGQ |
| | | | GTKVEIK |
| | 5005 | DNA VL | gatatccagatgacccagtccccgagctccctgtccgcctctgtgggcga |
| | | | tagggtcaccatcacctgccgtgccagtcaggatgtgaatactgctgtag |
| | | | cctggtatcaacagaaaccaggaaaagctccgaaactactgatttactcg |
| | | | gcatccttcctcTACtctggagtcccttctcgcttctctggatccagatc |
| | | | tgggacggatttcactctgaccatcagcagtctgcagccggaagacttcg |
| | | | caacttattactgtcagcaacattatactactcctcccacgttcggacag |
| | | | ggtaccaaggtggagatcaaa |
| | 5036 | Light Chain | DIQMTQSPSSLSASVGDRVTITCRASQDVNTAVAWYQQKPGKAPKLLIYS |
| | | (hIgG kappa) | ASFLYSGVPSRFSGSRSGTDFTLTISSLQPEDFATYYCQQHYTTPPTFGQ |
| | | | GTKVEIKRTVAAPSVFIFPPSDEQLKSGTASVVCLLNNFYPREAKVQWKV |
| | | | DNALQSGNSQESVTEQDSKDSTYSLSSTLTLSKADYEKHKVYACEVTHQG |
| | | | LSSPVTKSENRGEC |
| | 5035 | DNA Light | gatatccagatgacccagtccccgagctccctgtccgcctctgtgggcga |
| | | Chain (hIgG | tagggtcaccatcacctgccgtgccagtcaggatgtgaatactgctgtag |
| | | kappa) | cctggtatcaacagaaaccaggaaaagctccgaaactactgatttactcg |
| | | | gcatccttcctcTACtctggagtcccttctcgcttctctggatccagatc |
| | | | tgggacggatttcactctgaccatcagcagtctgcagccggaagacttcg |
| | | | caacttattactgtcagcaacattatactactcctcccacgttcggacag |
| | | | ggtaccaaggtggagatcaaacgaactgtggctgcaccatctgtcttcat |
| | | | cttcccgccatctgatgagcagttgaaatctggaactgcctctgttgtgt |
| | | | gcctgctgaataacttctatcccagagaggccaaagtacagtggaaggtg |
| | | | gataacgccctccaatcgggtaactcccaggagagtgtcacagagcagga |
| | | | cagcaaggacagcacctacagcctcagcagcaccctgacgctgagcaaag |
| | | | cagactacgagaaacacaaagtctacgcctgcgaagtcacccatcagggc |
| | | | ctgagctcgcccgtcacaaagagcttcaacaggggagagtgt |
| Ab-HER- | 5179 | HC CDR1 | DYTMD |
| 05 | | (Kabat) | |
| | 5180 | HC CDR2 | DVNPNSGGSIYNQRFKG |
| | | (Kabat) | |
| | 5181 | HC CDR3 | NLGPSFYFDYW |
| | | (Kabat) | |
| | 5172 | VH | EVQLVESGGGLVQPGGSLRLSCAASGFTFTDYTMDWVRQAPGKGLEWVAD |
| | | | VNPNSGGSIYNQRFKGRFTLSVDRSKNTLYLQMNSLRAEDTAVYYCARNL |
| | | | GPSFYFDYWGQGTLVTVSS |
| | 5171 | DNA VH | gaggttcagctggtggagtctggcggtggcctggtgcagccagggggctc |
| | | | actccgtttgtcctgtgcagcttctggcttcaCcTTCaCCgacTATACCA |
| | | | TGGATtgggtgcgtcaggccccgggtaagggcctggaatgggttgcaGAC |
| | | | GTGAATcctAATTCTggtGGTTCTATAtatAATCAGCGTTTCaagggccg |
| | | | tttcactCTGagcGTTgacCGTtccaaaaacacaCTGtacctgcagatga |
| | | | acagcctgcgtgctgaggacactgccgtctattattgtGCAagaAATCTG |
| | | | gggCCTAGCttctatTTCgacTACtggggtcaaggaaccctggtcaccgt |
| | | | ctcctcg |
| | 5174 | Heavy Chain | EVQLVESGGGLVQPGGSLRLSCAASGFTFTDYTMDWVRQAPGKGLEWVAD |
| | | (hIgG1) | VNPNSGGSIYNQRFKGRFTLSVDRSKNTLYLQMNSLRAEDTAVYYCARNL |
| | | | GPSFYFDYWGQGTLVTVSSASTKGPSVFPLAPSSKSTSGGTAALGCLVKD |
| | | | YFPEPVTVSWNSGALTSGVHTFPAVLQSSGLYSLSSVVTVPSSSLGTQTY |
| | | | ICNVNHKPSNTKVDKKVEPKSCDKTHTCPPCPAPELLGGPSVFLFPPKPK |
| | | | DTLMISRTPEVTCVVVDVSHEDPEVKFNWYVDGVEVHNAKTKPREEQYNS |
| | | | TYRVVSVLTVLHQDWLNGKEYKCKVSNKALPAPIEKTISKAKGQPREPQV |
| | | | YTLPPSREEMTKNQVSLTCLVKGFYPSDIAVEWESNGQPENNYKTTPPVL |
| | | | DSDGSFFLYSKLTVDKSRWQQGNVFSCSVMHEALHNHYTQKSLSLSPGK |
| | 5173 | DNA Heavy | gaggttcagctggtggagtctggcggtggcctggtgcagccagggggctc |
| | | Chain | actccgtttgtcctgtgcagcttctggcttcaCcTTCaCCgacTATACCA |
| | | (hIgG1) | TGGATtgggtgcgtcaggccccgggtaagggcctggaatgggttgcaGAC |
| | | | GTGAATcctAATTCTggtGGTTCTATAtatAATCAGCGTTTCaagggccg |
| | | | tttcactCTGagcGTTgacCGTtccaaaaacacaCTGtacctgcagatga |
| | | | acagcctgcgtgctgaggacactgccgtctattattgtGCAagaAATCTG |
| | | | gggCCTAGCttctatTTCgacTACtggggtcaaggaaccctggtcaccgt |
| | | | ctcctcggcgtcgaccaagggcccatcggtcttccccctggcaccctcct |
| | | | ccaagagcacctctgggggcacagcggccctgggctgcctggtcaaggac |
| | | | tacttccccgaacctgtgacggtctcgtggaactcaggcgccctgaccag |
| | | | cggcgtgcacaccttcccggctgtcctacagtcctcaggactctactccc |
| | | | tcagcagcgtggtgaccgtgccctccagcagcttgggcacccagacctac |
| | | | atctgcaacgtgaatcacaagcccagcaacaccaaggtggacaagaaagt |
| | | | tgagcccaaatcttgtgacaaaactcacacatgcccaccgtgcccagcac |
| | | | ctgaactcctggggggaccgtcagtcttcctcttccccccaaaacccaag |
| | | | gacaccctcatgatctcccggacccctgaggtcacatgcgtggtggtgga |
| | | | cgtgagccacgaagaccctgaggtcaagttcaactggtacgtggacggcg |
| | | | tggaggtgcataatgccaagacaaagccgcgggaggagcagtacaacagc |
| | | | acgtaccgtgtggtcagcgtcctcaccgtcctgcaccaggactggctgaa |
| | | | tggcaaggagtacaagtgcaaggtctccaacaaagccctcccagccccca |
| | | | tcgagaaaaccatctccaaagccaaagggcagccccgagaaccacaggtg |
| | | | tacaccctgcccccatcccgggaGgagAtgaccaagaaccaggtcagcct |
| | | | gacctgcctggtcaaaggcttctatcccagcgacatcgccgtggagtggg |
| | | | agagcaatgggcagccggagaacaactacaagaccacgcctcccgtgctg |
| | | | gactccgacggctccttcttcctctacagcaagctcaccgtggacaagag |
| | | | caggtggcagcaggggaacgtcttctcatgctccgtgatgcatgaggctc |
| | | | tgcacaaccactacacgcagaagagcctctccctgtctccgggtaaa |
| | 5182 | LC CDR1 | KASQDVSIGVA |
| | | (Kabat) | |
| | 5183 | LC CDR2 | SASYRYT |
| | | (Kabat) | |
| | 5184 | LC CDR3 | QQYYIYPYT |
| | | (Kabat) | |
| | 5176 | VL | DIQMTQSPSSLSASVGDRVTITCKASQDVSIGVAWYQQKPGKAPKLLIYS |
| | | | ASYRYTGVPSRFSGSGSGTDFTLTISSLQPEDFATYYCQQYYIYPYTFGQ |
| | | | GTKVEIK |
| | 5175 | DNA VL | gatatccagatgacccagtccccgagctccctgtccgcctctgtgggcga |
| | | | tagggtcaccatcacctgcAAAgccagtcaggatgtgTCCATTGGGgtag |
| | | | cctggtatcaacagaaaccaggaaaagctccgaaactactgatttactcg |
| | | | gcatccTATCGCTACACGggagtcccttctcgcttctctggatccGGTtc |
| | | | tgggacggatttcactctgaccatcagcagtctgcagccggaagacttcg |
| | | | caacttattactgtcagcaaTACtatATCTATcctTACacgttcggacag |
| | | | ggtaccaaggtggagatcaaa |
| | 5178 | Light Chain | DIQMTQSPSSLSASVGDRVTITCKASQDVSIGVAWYQQKPGKAPKLLIYS |
| | | (hIgG1) | ASYRYTGVPSRFSGSGSGTDFTLTISSLQPEDFATYYCQQYYIYPYTFGQ |
| | | | GTKVEIKRTVAAPSVFIFPPSDEQLKSGTASVVCLLNNFYPREAKVQWKV |
| | | | DNALQSGNSQESVTEQDSKDSTYSLSSTLTLSKADYEKHKVYACEVTHQG |
| | | | LSSPVTKSENRGEC |
| | 5177 | DNA Light | gatatccagatgacccagtccccgagctccctgtccgcctctgtgggcga |
| | | Chain | tagggtcaccatcacctgcAAAgccagtcaggatgtgTCCATTGGGgtag |
| | | (hIgG1) | cctggtatcaacagaaaccaggaaaagctccgaaactactgatttactcg |
| | | | gcatccTATCGCTACACGggagtcccttctcgcttctctggatccGGTtc |
| | | | tgggacggatttcactctgaccatcagcagtctgcagccggaagacttcg |
| | | | caacttattactgtcagcaaTACtatATCTATcctTACacgttcggacag |
| | | | ggtaccaaggtggagatcaaacgaactgtggctgcaccatctgtcttcat |
| | | | cttcccgccatctgatgagcagttgaaatctggaactgcctctgttgtgt |
| | | | gcctgctgaataacttctatcccagagaggccaaagtacagtggaaggtg |
| | | | gataacgccctccaatcgggtaactcccaggagagtgtcacagagcagga |
| | | | cagcaaggacagcacctacagcctcagcagcaccctgacgctgagcaaag |
| | | | cagactacgagaaacacaaagtctacgcctgcgaagtcacccatcagggc |
| | | | ctgagctcgcccgtcacaaagagcttcaacaggggagagtgt |
| Ab-HER- | 5053 | HC CDR1 | DTYIH |
| 10 | | (Kabat) | |
| | 5054 | HC CDR2 | RIYPTNGYTRYDPKFQD |
| | | (Kabat) | |
| | 5055 | HC CDR3 | WGGDGFYAMDY |
| | | (Kabat) | |
| | 5056 | HC CDR1 | GFNIKDT |
| | | (Chothia) | |
| | 5057 | HC CDR2 | YPTNGY |
| | | (Chothia) | |
| | 5058 | HC CDR3 | WGGDGFYAMDY |
| | | (Chothia) | |
| | 5016 | VH | QVQLQQSGPELVKPGASLKLSCTASGFNIKDTYIHWVKQRPEQGLEWIGR |
| | | | IYPTNGYTRYDPKFQDKATITADTSSNTAYLQVSRLTSEDTAVYYCSRWG |
| | | | GDGFYAMDYWGQGASVTVSS |
| | 5015 | DNA VH | CAGGTGCAGCTGCAGCAGAGCGGCCCCGAGCTGGTGAAGCCCGGCGCCAG |
| | | | CCTGAAGCTGAGCTGCACCGCCAGCGGCTTCAACATCAAGGACACCTACA |
| | | | TCCACTGGGTGAAGCAGAGACCCGAGCAGGGCCTGGAGTGGATCGGCAGA |
| | | | ATCTACCCCACCAACGGCTACACCAGATACGACCCCAAGTTCCAGGACAA |
| | | | GGCCACCATCACCGCCGACACCAGCAGCAACACCGCCTACCTGCAGGTGA |
| | | | GCAGACTGACCAGCGAGGACACCGCCGTGTACTACTGCAGCAGATGGGGC |
| | | | GGCGACGGCTTCTACGCCATGGACTACTGGGGCCAGGGCGCCAGCGTGAC |
| | | | CGTGAGCAGC |
| | 5050 | Heavy Chain | QVQLQQSGPELVKPGASLKLSCTASGFNIKDTYIHWVKQRPEQGLEWIGR |
| | | (hIgG1) | IYPTNGYTRYDPKFQDKATITADTSSNTAYLQVSRLTSEDTAVYYCSRWG |
| | | | GDGFYAMDYWGQGASVTVSSASTKGPSVFPLAPSSKSTSGGTAALGCLVK |
| | | | DYFPEPVTVSWNSGALTSGVHTFPAVLQSSGLYSLSSVVTVPSSSLGTQT |
| | | | YICNVNHKPSNTKVDKRVEPKSCDKTHTCPPCPAPELVGGPSVFLLPPKP |
| | | | KDTLMISRTPEVTCVVVDVSHEDPEVKFNWYVDGVEVHNAKTKPPEEQYN |
| | | | STLRVVSVLIVLHQDWLNGKEYKCKVSNKALPAPIEKTISKAKGQPREPQ |
| | | | VYTLPPSRDELTKNQVSLTCLVKGFYPSDIAVEWESNGQPENNYKTTPLV |
| | | | LDSDGSFFLYSKLTVDKSRWQQGNVFSCSVMHEALHNHYTQKSLSLSPGK |
| | 5049 | DNA Heavy | CAGGTGCAGCTGCAGCAGAGCGGCCCCGAGCTGGTGAAGCCCGGCGCCAG |
| | | Chain | CCTGAAGCTGAGCTGCACCGCCAGCGGCTTCAACATCAAGGACACCTACA |
| | | (hIgG1) | TCCACTGGGTGAAGCAGAGACCCGAGCAGGGCCTGGAGTGGATCGGCAGA |
| | | | ATCTACCCCACCAACGGCTACACCAGATACGACCCCAAGTTCCAGGACAA |
| | | | GGCCACCATCACCGCCGACACCAGCAGCAACACCGCCTACCTGCAGGTGA |
| | | | GCAGACTGACCAGCGAGGACACCGCCGTGTACTACTGCAGCAGATGGGGC |
| | | | GGCGACGGCTTCTACGCCATGGACTACTGGGGCCAGGGCGCCAGCGTGAC |
| | | | CGTGAGCAGCgcgtcgaccaagggcccatcggtcttccccctggcaccct |
| | | | cctccaagagcacctctgggggcacagcggccctgggctgcctggtcaag |
| | | | gactacttccccgaacctgtgacggtctcgtggaactcaggcgccctgac |
| | | | cagcggcgtgcacaccttcccggctgtcctacagtcctcaggactctact |
| | | | ccctcagcagcgtggtgaccgtgccctccagcagcttgggcacccagacc |
| | | | tacatctgcaacgtgaatcacaagcccagcaacaccaaggtggacaagaG |
| | | | agttgagcccaaatcttgtgacaaaactcacacatgcccaccgtgcccag |
| | | | cacctgaactcGtggggggaccgtcagtcttcctcCtccccccaaaaccc |
| | | | aaggacaccctcatgatctcccggacccctgaggtcacatgcgtggtggt |
| | | | ggacgtgagccacgaagaccctgaggtcaagttcaactggtacgtggacg |
| | | | gcgtggaggtgcataatgccaagacaaagccgcCggaggagcagtacaac |
| | | | agcacgCTccgtgtggtcagcgtcctcaccgtcctgcaccaggactggct |
| | | | gaatggcaaggagtacaagtgcaaggtctccaacaaagccctcccagccc |
| | | | ccatcgagaaaaccatctccaaagccaaagggcagccccgagaaccacag |
| | | | gtgtacaccctgcccccatcccgggaTgagCtgaccaagaaccaggtcag |
| | | | cctgacctgcctggtcaaaggcttctatcccagcgacatcgccgtggagt |
| | | | gggagagcaatgggcagccggagaacaactacaagaccacgcctcTcgtg |
| | | | ctggactccgacggctccttcttcctctacagcaagctcaccgtggacaa |
| | | | gagcaggtggcagcaggggaacgtcttctcatgctccgtgatgcatgagg |
| | | | ctctgcacaaccactacacgcagaagagcctctccctgtctccgggtaaa |
| | 5059 | LC CDR1 | KASQDVNTAVA |
| | | (Kabat) | |
| | 5060 | LC CDR2 | SASFRYT |
| | | (Kabat) | |
| | 5061 | LC CDR3 | QQHYTTPPT |
| | | (Kabat) | |
| | 5062 | LC CDR1 | KASQDVNTAVA |
| | | (Chothia) | |
| | 5063 | LC CDR2 | SASFRYT |
| | | (Chothia) | |
| | 5064 | LC CDR3 | QQHYTTPPT |
| | | (Chothia) | |
| | 5020 | VL | DIVMTQSHKFMSTSVGDRVSITCKASQDVNTAVAWYQQKPGHSPKLLIYS |
| | | | ASFRYTGVPDRFTGSRSGTDFTFTISSVQAEDLAVYYCQQHYTTPPTFGG |
| | | | GTKVEIK |
| | 5019 | DNA VL | GACATCGTGATGACCCAGAGCCACAAGTTCATGAGCACCAGCGTGGGCGA |
| | | | CAGAGTGAGCATCACCTGCAAGGCCAGCCAGGACGTGAACACCGCCGTGG |
| | | | CCTGGTACCAGCAGAAGCCCGGCCACAGCCCCAAGCTGCTGATCTACAGC |
| | | | GCCAGCTTCAGATACACCGGCGTGCCGGACAGATTCACCGGCAGCAGAAG |
| | | | CGGCACCGACTTCACCTTCACCATCAGCAGCGTGCAGGCCGAGGACCTGG |
| | | | CCGTGTACTACTGCCAGCAGCACTACACCACCCCTCCTACCTTCGGCGGC |
| | | | GGCACCAAGGTGGAGATCAAG |
| | 5052 | Light Chain | DIVMTQSHKFMSTSVGDRVSITCKASQDVNTAVAWYQQKPGHSPKLLIYS |
| | | (hIgG1) | ASFRYTGVPDRFTGSRSGTDFTFTISSVQAEDLAVYYCQQHYTTPPTFGG |
| | | | GTKVEIKRTVAAPSVFIFPPSDEQLKSGTASVVCLLNNFYPREAKVQWKV |
| | | | DNALQSGNSQESVTEQDSKDSTYSLSSTLTLSKADYEKHKVYACEVTHQG |
| | | | LSSPVTKSFNRGEC |
| | 5051 | DNA Light | GACATCGTGATGACCCAGAGCCACAAGTTCATGAGCACCAGCGTGGGCGA |
| | | Chain | CAGAGTGAGCATCACCTGCAAGGCCAGCCAGGACGTGAACACCGCCGTGG |
| | | (hIgG1) | CCTGGTACCAGCAGAAGCCCGGCCACAGCCCCAAGCTGCTGATCTACAGC |
| | | | GCCAGCTTCAGATACACCGGCGTGCCGGACAGATTCACCGGCAGCAGAAG |
| | | | CGGCACCGACTTCACCTTCACCATCAGCAGCGTGCAGGCCGAGGACCTGG |
| | | | CCGTGTACTACTGCCAGCAGCACTACACCACCCCTCCTACCTTCGGCGGC |
| | | | GGCACCAAGGTGGAGATCAAGAGAACCGTGGCCGCCCCTAGCGTGTTCAT |
| | | | CTTCCCGCCAAGCGACGAGCAGCTGAAGAGCGGCACCGCCAGCGTGGTGT |
| | | | GCCTGCTGAACAACTTCTACCCCAGAGAGGCCAAGGTGCAGTGGAAGGTG |
| | | | GACAACGCCCTGCAGAGCGGCAACAGCCAGGAGAGCGTGACCGAGCAGGA |
| | | | CAGCAAGGACAGCACCTACAGCCTGAGCAGCACCCTGACCCTGAGCAAGG |
| | | | CCGACTACGAGAAGCACAAGGTGTACGCCTGCGAGGTGACCCACCAGGGC |
| | | | CTGAGCAGCCCCGTGACCAAGAGCTTCAACAGAGGCGAGTGCt |
| Ab-HER- | 5149 | HC CDR1 | DYTMD |
| 15 | | (Kabat) | |
| | 5150 | HC CDR2 | DVNPNSGGSIYNQRFKG |
| | | (Kabat) | |
| | 5151 | HC CDR3 | NLGPSFYFDYW |
| | | (Kabat) | |
| | 5010 | VH | EVQLVESGGGLVQPGGSLRLSCAASGFTFTDYTMDWVRQAPGKGLEWVAD |
| | | | VNPNSGGSIYNQRFKGRFTLSVDRSKNTLYLQMNSLRAEDTAVYYCARNL |
| | | | GPSFYFDYWGQGTLVTVSS |
| | 5009 | DNA VH | gaggttcagctggtggagtctggcggtggcctggtgcagccagggggctc |
| | | | actccgtttgtcctgtgcagcttctggcttcaCcTTCaCCgacTATACCA |
| | | | TGGATtgggtgcgtcaggccccgggtaagggcctggaatgggttgcaGAC |
| | | | GTGAATcctAATTCTggtGGTTCTATAtatAATCAGCGTTTCaagggccg |
| | | | tttcactCTGagcGTTgacCGTtccaaaaacacaCTGtacctgcagatga |
| | | | acagcctgcgtgctgaggacactgccgtctattattgtGCAagaAATCTG |
| | | | gggCCTAGCttctatTTCgacTACtggggtcaaggaaccctggtcaccgt |
| | | | ctcctcg |
| | 5066 | Heavy Chain | EVQLVESGGGLVQPGGSLRLSCAASGFTFTDYTMDWVRQAPGKGLEWVAD |
| | | (hIgG1) | VNPNSGGSIYNQRFKGRFTLSVDRSKNTLYLQMNSLRAEDTAVYYCARNL |
| | | | GPSFYFDYWGQGTLVTVSSASTKGPSVFPLAPSSKSTSGGTAALGCLVKD |
| | | | YFPEPVTVSWNSGALTSGVHTFPAVLQSSGLYSLSSVVTVPSSSLGTQTY |
| | | | ICNVNHKPSNTKVDKKVEPKSCDKTHTCPPCPAPELLGGPSVFLFPPKPK |
| | | | DTLMISRTPEVTCVVVDVSHEDPEVKENWYVDGVEVHNAKTKPREEQYNS |
| | | | TYRVVSVLTVLHQDWLNGKEYKCKVSNKALPAPIEKTISKAKGQPREPQV |
| | | | YTLPPSREEMTKNQVSLTCLVKGFYPSDIAVEWESNGQPENNYKTTPPVL |
| | | | DSDGSFFLYSKLTVDKSRWQQGNVFSCSVMHEALHNHYTQKSLSLSPGK |
| | 5065 | DNA Heavy | gaggttcagctggtggagtctggcggtggcctggtgcagccagggggctc |
| | | Chain | actccgtttgtcctgtgcagcttctggcttcaCcTTCaCCgacTATACCA |
| | | (hIgG1) | TGGATtgggtgcgtcaggccccgggtaagggcctggaatgggttgcaGAC |
| | | | GTGAATcctAATTCTggtGGTTCTATAtatAATCAGCGTTTCaagggccg |
| | | | tttcactCTGagcGTTgacCGTtccaaaaacacaCTGtacctgcagatga |
| | | | acagcctgcgtgctgaggacactgccgtctattattgtGCAagaAATCTG |
| | | | gggCCTAGCttctatTTCgacTACtggggtcaaggaaccctggtcaccgt |
| | | | ctcctcggcgtcgaccaagggcccatcggtcttccccctggcaccctcct |
| | | | ccaagagcacctctgggggcacagcggccctgggctgcctggtcaaggac |
| | | | tacttccccgaacctgtgacggtctcgtggaactcaggcgccctgaccag |
| | | | cggcgtgcacaccttcccggctgtcctacagtcctcaggactctactccc |
| | | | tcagcagcgtggtgaccgtgccctccagcagcttgggcacccagacctac |
| | | | atctgcaacgtgaatcacaagcccagcaacaccaaggtggacaagaaagt |
| | | | tgagcccaaatcttgtgacaaaactcacacatgcccaccgtgcccagcac |
| | | | ctgaactcctggggggaccgtcagtcttcctcttccccccaaaacccaag |
| | | | gacaccctcatgatctcccggacccctgaggtcacatgcgtggtggtgga |
| | | | cgtgagccacgaagaccctgaggtcaagttcaactggtacgtggacggcg |
| | | | tggaggtgcataatgccaagacaaagccgcgggaggagcagtacaacagc |
| | | | acgtaccgtgtggtcagcgtcctcaccgtcctgcaccaggactggctgaa |
| | | | tggcaaggagtacaagtgcaaggtctccaacaaagccctcccagccccca |
| | | | tcgagaaaaccatctccaaagccaaagggcagccccgagaaccacaggtg |
| | | | tacaccctgcccccatcccgggaGgagAtgaccaagaaccaggtcagcct |
| | | | gacctgcctggtcaaaggcttctatcccagcgacatcgccgtggagtggg |
| | | | agagcaatgggcagccggagaacaactacaagaccacgcctcccgtgctg |
| | | | gactccgacggctccttcttcctctacagcaagctcaccgtggacaagag |
| | | | caggtggcagcaggggaacgtcttctcatgctccgtgatgcatgaggctc |
| | | | tgcacaaccactacacgcagaagagcctctccctgtctccgggtaaa |
| | 5156 | C12 Fynomer | GVTLFVALYDYTSYNTRDLSFHKGEKFQILRMEDGVWWEARSLTTGETGY |
| | | | IPSNYVAPVDSIQ |
| | 5155 | DNA C12 | GGCGTGACCCTGTTCGTGGCCCTGTACGACTACACCAGCTACAACACCAG |
| | | Fynomer | GGACCTGAGCTTCCACAAGGGCGAGAAGTTCCAGATCCTGAGGATGGAGG |
| | | | ACGGCGTGTGGTGGGAGGCCAGGAGCCTGACCACCGGCGAGACCGGCTAC |
| | | | ATCCCCAGCAACTACGTGGCCCCCGTGGACAGCATCCAG |
| | 5152 | LC CDR1 | KASQDVSIGVA |
| | | (Kabat) | |
| | 5153 | LC CDR2 | SASYRYT |
| | | (Kabat) | |
| | 5154 | LC CDR3 | QQYYIYPYT |
| | | (Kabat) | |
| | 5014 | VL | DIQMTQSPSSLSASVGDRVTITCKASQDVSIGVAWYQQKPGKAPKLLIYS |
| | | | ASYRYTGVPSRFSGSGSGTDFTLTISSLQPEDFATYYCQQYYIYPYTFGQ |
| | | | GTKVEIK |
| | 5013 | DNA VL | gatatccagatgacccagtccccgagctccctgtccgcctctgtgggcga |
| | | | tagggtcaccatcacctgcAAAgccagtcaggatgtgTCCATTGGGgtag |
| | | | cctggtatcaacagaaaccaggaaaagctccgaaactactgatttactcg |
| | | | gcatccTATCGCTACACGggagtcccttctcgcttctctggatccGGTtc |
| | | | tgggacggatttcactctgaccatcagcagtctgcagccggaagacttcg |
| | | | caacttattactgtcagcaaTACtatATCTATcctTACacgttcggacag |
| | | | ggtaccaaggtggagatcaaa |
| | 5068 | Light Chain | DIQMTQSPSSLSASVGDRVTITCKASQDVSIGVAWYQQKPGKAPKLLIYS |
| | | (hIgG1) | ASYRYTGVPSRFSGSGSGTDFTLTISSLQPEDFATYYCQQYYIYPYTFGQ |
| | | | GTKVEIKRTVAAPSVFIFPPSDEQLKSGTASVVCLLNNFYPREAKVQWKV |
| | | | DNALQSGNSQESVTEQDSKDSTYSLSSTLTLSKADYEKHKVYACEVTHQG |
| | | | LSSPVTKSENRGEC |
| | 5067 | DNA Light | gatatccagatgacccagtccccgagctccctgtccgcctctgtgggcga |
| | | Chain | tagggtcaccatcacctgcAAAgccagtcaggatgtgTCCATTGGGgtag |
| | | (hIgG1) | cctggtatcaacagaaaccaggaaaagctccgaaactactgatttactcg |
| | | | gcatccTATCGCTACACGggagtcccttctcgcttctctggatccGGTtc |
| | | | tgggacggatttcactctgaccatcagcagtctgcagccggaagacttcg |
| | | | caacttattactgtcagcaaTACtatATCTATcctTACacgttcggacag |
| | | | ggtaccaaggtggagatcaaacgaactgtggctgcaccatctgtcttcat |
| | | | cttcccgccatctgatgagcagttgaaatctggaactgcctctgttgtgt |
| | | | gcctgctgaataacttctatcccagagaggccaaagtacagtggaaggtg |
| | | | gataacgccctccaatcgggtaactcccaggagagtgtcacagagcagga |
| | | | cagcaaggacagcacctacagcctcagcagcaccctgacgctgagcaaag |
| | | | cagactacgagaaacacaaagtctacgcctgcgaagtcacccatcagggc |
| | | | ctgagctcgcccgtcacaaagagcttcaacaggggagagtgt |
| Ab-HER- | 5071 | HC CDR1 | DTYIH |
| 42 | | (Kabat) | |
| | 5072 | HC CDR2 | RIYPTNGYTRYADSVKG |
| | | (Kabat) | |
| | 5073 | HC CDR3 | WGGDGFYAMDY |
| | | (Kabat) | |
| | 5074 | HC CDR1 | GFNIKDT |
| | | (Chothia) | |
| | 5075 | HC CDR2 | YPTNGY |
| | | (Chothia) | |
| | 5076 | HC CDR3 | WGGDGFYAMDY |
| | | (Chothia) | |
| | 5069 | VH | EVQLVESGGGLVQPGGSLRLSCAASGFNIKDTYIHWVRQAPGKGLEWVAR |
| | | | IYPTNGYTRYADSVKGRFTISADTSKNTAYLQMNSLRAEDTAVYYCSRWG |
| | | | GDGFYAMDYWGQGTLVTVSS |
| | 5070 | DNA VH | gaggttcagctggtggagtctggcggtggcctggtgcagccagggggctc |
| | | | actccgtttgtcctgtgcagcttctggcttcaacattaaagacacctata |
| | | | tacactgggtgcgtcaggccccgggtaagggcctggaatgggttgcaagg |
| | | | atttatcctacgaatggttatactagatatgccgatagcgtcaagggccg |
| | | | tttcactataagcgcagacacatccaaaaacacagcctacctgcagatga |
| | | | acagcctgcgtgctgaggacactgccgtctattattgttctagatgggga |
| | | | ggggacggcttctatgctatggacTACtggggtcaaggaaccctggtcac |
| | | | cgtctcctcg |
| | 5084 | Heavy Chain | EVQLVESGGGLVQPGGSLRLSCAASGFNIKDTYIHWVRQAPGKGLEWVAR |
| | | (hIgG1) | IYPTNGYTRYADSVKGRFTISADTSKNTAYLQMNSLRAEDTAVYYCSRWG |
| | | | GDGFYAMDYWGQGTLVTVSSASTKGPSVFPLAPSSKSTSGGTAALGCLVK |
| | | | DYFPEPVTVSWNSGALTSGVHTFPAVLQSSGLYSLSSVVTVPSSSLGTQT |
| | | | YICNVNHKPSNTKVDKKVEPPKSCDKTHTCPPCPAPELLGGPSVFLFPPK |
| | | | PKDTLMISRTPEVTCVVVDVSHEDPEVKFNWYVDGVEVHNAKTKPREEQY |
| | | | NSTYRVVSVLTVLHQDWLNGKEYKCKVSNKALPAPIEKTISKAKGQPREP |
| | | | QVYTLPPSRDELTKNQVSLTCLVKGFYPSDIAVEWESNGQPENNYKTTPP |
| | | | VLDSDGSFFLYSKLTVDKSRWQQGNVFSCSVMHEALHNQYTQKSLSLSPG |
| | | | K |
| | 5083 | DNA Heavy | gaggttcagctggtggagtctggcggtggcctggtgcagccagggggctc |
| | | Chain | actccgtttgtcctgtgcagcttctggcttcaacattaaagacacctata |
| | | (hIgG1) | tacactgggtgcgtcaggccccgggtaagggcctggaatgggttgcaagg |
| | | | atttatcctacgaatggttatactagatatgccgatagcgtcaagggccg |
| | | | tttcactataagcgcagacacatccaaaaacacagcctacctgcagatga |
| | | | acagcctgcgtgctgaggacactgccgtctattattgttctagatgggga |
| | | | ggggacggcttctatgctatggacTACtggggtcaaggaaccctggtcac |
| | | | cgtctcctcggcgtcgaccaagggcccatcggtcttccccctggcaccct |
| | | | cctccaagagcacctctgggggcacagcggccctgggctgcctggtcaag |
| | | | gactacttccccgaacctgtgacggtctcgtggaactcaggcgccctgac |
| | | | cagcggcgtgcacaccttcccggctgtcctacagtcctcaggactctact |
| | | | ccctcagcagcgtggtgaccgtgccctccagcagcttgggcacccagacc |
| | | | tacatctgcaacgtgaatcacaagcccagcaacaccaaggtggacaagaa |
| | | | agttgagcccCCCaaatcttgtgacaaaactcacacatgcccaccgtgcc |
| | | | cagcacctgaactcctggggggaccgtcagtcttcctcttccccccaaaa |
| | | | cccaaggacaccctcatgatctcccggacccctgaggtcacatgcgtggt |
| | | | ggtggacgtgagccacgaagaccctgaggtcaagttcaactggtacgtgg |
| | | | acggcgtggaggtgcataatgccaagacaaagccgcgggaggagcagtac |
| | | | aacagcacgtaccgtgtggtcagcgtcctcaccgtcctgcaccaggactg |
| | | | gctgaatggcaaggagtacaagtgcaaggtctccaacaaagccctcccag |
| | | | cccccatcgagaaaaccatctccaaagccaaagggcagccccgagaacca |
| | | | caggtgtacaccctgcccccatcccgggatgagctgaccaagaaccaggt |
| | | | cagcctgacctgcctggtcaaaggcttctatcccagcgacatcgccgtgg |
| | | | agtgggagagcaatgggcagccggagaacaactacaagaccacgcctccc |
| | | | gtgctggactccgacggctccttcttcctctacagcaagctcaccgtgga |
| | | | caagagcaggtggcagcaggggaacgtcttctcatgctccgtgatgcatg |
| | | | aggctctgcacaacCAGtacacgcagaagagcctctccctgtctccgggt |
| | | | aaa |
| | 5077 | LC CDR1 | RASQDVNTAVA |
| | | (Kabat) | |
| | 5078 | LC CDR2 | SASFLYS |
| | | (Kabat) | |
| | 5079 | LC CDR3 | QQHYTTPPT |
| | | (Kabat) | |
| | 5080 | LC CDR1 | RASQDVNTAVA |
| | | (Chothia) | |
| | 5081 | LC CDR2 | SASFLYS |
| | | (Chothia) | |
| | 5082 | LC CDR3 | QQHYTTPPT |
| | | (Chothia) | |
| | 5086 | VL | DIQMTQSPSSLSASVGDRVTITCRASQDVNTAVAWYQQKPGKAPKLLIYS |
| | | | ASFLYSGVPSRFSGSRSGTDFTLTISSLQPEDFATYYCQQHYTTPPTFGQ |
| | | | GTKVEIK |
| | 5085 | DNA VL | gatatccagatgacccagtccccgagctccctgtccgcctctgtgggcga |
| | | | tagggtcaccatcacctgccgtgccagtcaggatgtgaatactgctgtag |
| | | | cctggtatcaacagaaaccaggaaaagctccgaaactactgatttactcg |
| | | | gcatccttcctcTACtctggagtcccttctcgcttctctggatccagatc |
| | | | tgggacggatttcactctgaccatcagcagtctgcagccggaagacttcg |
| | | | caacttattactgtcagcaacattatactactcctcccacgttcggacag |
| | | | ggtaccaaggtggagatcaaa |
| | 5088 | Light Chain | DIQMTQSPSSLSASVGDRVTITCRASQDVNTAVAWYQQKPGKAPKLLIYS |
| | | (hIgG1) | ASFLYSGVPSRFSGSRSGTDFTLTISSLQPEDFATYYCQQHYTTPPTFGQ |
| | | | GTKVEIKRTVAAPSVFIFPPSDEQLKSGTASVVCLLNNFYPREAKVQWKV |
| | | | DNALQSGNSQESVTEQDSKDSTYSLSSTLTLSKADYEKHKVYACEVTHQG |
| | | | LSSPVTKSFNRGEC |
| | 5087 | DNA Light | gatatccagatgacccagtccccgagctccctgtccgcctctgtgggcga |
| | | Chain | tagggtcaccatcacctgccgtgccagtcaggatgtgaatactgctgtag |
| | | (hIgG1) | cctggtatcaacagaaaccaggaaaagctccgaaactactgatttactcg |
| | | | gcatccttcctcTACtctggagtcccttctcgcttctctggatccagatc |
| | | | tgggacggatttcactctgaccatcagcagtctgcagccggaagacttcg |
| | | | caacttattactgtcagcaacattatactactcctcccacgttcggacag |
| | | | ggtaccaaggtggagatcaaacgaactgtggctgcaccatctgtcttcat |
| | | | cttcccgccatctgatgagcagttgaaatctggaactgcctctgttgtgt |
| | | | gcctgctgaataacttctatcccagagaggccaaagtacagtggaaggtg |
| | | | gataacgccctccaatcgggtaactcccaggagagtgtcacagagcagga |
| | | | cagcaaggacagcacctacagcctcagcagcaccctgacgctgagcaaag |
| | | | cagactacgagaaacacaaagtctacgcctgcgaagtcacccatcagggc |
| | | | ctgagctcgcccgtcacaaagagcttcaacaggggagagtgt |
| Ab-HER- | 5199 | HC CDR1 | DTYIH |
| 43 | | (Kabat) | |
| | 5200 | HC CDR2 | RIYPTNGYTRYADSVKG |
| | | (Kabat) | |
| | 5201 | HC CDR3 | WGGDGFYAMDY |
| | | (Kabat) | |
| | 5202 | HC CDR1 | GFNIKDT |
| | | (Chothia) | |
| | 5203 | HC CDR2 | YPTNGY |
| | | (Chothia) | |
| | 5204 | HC CDR3 | WGGDGFYAMDY |
| | | (Chothia) | |
| | 5192 | VH | EVQLVESGGGLVQPGGSLRLSCAASGFNIKDTYIHWVRQAPGKGLEWVAR |
| | | | IYPTNGYTRYADSVKGRFTISADTSKNTAYLQMNSLRAEDTAVYYCSRWG |
| | | | GDGFYAMDYWGQGTLVTVSS |
| | 5191 | DNA VH | gaggttcagctggtggagtctggcggtggcctggtgcagccagggggctc |
| | | | actccgtttgtcctgtgcagcttctggcttcaacattaaagacacctata |
| | | | tacactgggtgcgtcaggccccgggtaagggcctggaatgggttgcaagg |
| | | | atttatcctacgaatggttatactagatatgccgatagcgtcaagggccg |
| | | | tttcactataagcgcagacacatccaaaaacacagcctacctgcagatga |
| | | | acagcctgcgtgctgaggacactgccgtctattattgttctagatgggga |
| | | | ggggacggcttctatgctatggacTACtggggtcaaggaaccctggtcac |
| | | | cgtctcctcg |
| | 5194 | Heavy Chain | EVQLVESGGGLVQPGGSLRLSCAASGFNIKDTYIHWVRQAPGKGLEWVAR |
| | | (hIgG1) | IYPTNGYTRYADSVKGRFTISADTSKNTAYLQMNSLRAEDTAVYYCSRWG |
| | | | GDGFYAMDYWGQGTLVTVSSASTKGPSVFPLAPSSKSTSGGTAALGCLVK |
| | | | DYFPEPVTVSWNSGALTSGVHTFPAVLQSSGLYSLSSVVTVPSSSLGTQT |
| | | | YICNVNHKPSNTKVDKKVEPPKSCDKTHTCPPCPAPELLGGPSVFLFPPK |
| | | | PKDTLMASRTPEVTCVVVDVSHEDPEVKFNWYVDGVEVHNAKTKPREEQY |
| | | | NSTYRVVSVLTVLAQDWLNGKEYKCKVSNKALPAPIEKTISKAKGQPREP |
| | | | QVYTLPPSRDELTKNQVSLTCLVKGFYPSDIAVEWESNGQPENNYKTTPP |
| | | | VLDSDGSFFLYSKLTVDKSRWQQGNVFSCSVMHEALHNHYTQKSLSLSPG |
| | | | K |
| | 5193 | DNA Heavy | gaggttcagctggtggagtctggcggtggcctggtgcagccagggggctc |
| | | Chain | actccgtttgtcctgtgcagcttctggcttcaacattaaagacacctata |
| | | (hIgG1) | tacactgggtgcgtcaggccccgggtaagggcctggaatgggttgcaagg |
| | | | atttatcctacgaatggttatactagatatgccgatagcgtcaagggccg |
| | | | tttcactataagcgcagacacatccaaaaacacagcctacctgcagatga |
| | | | acagcctgcgtgctgaggacactgccgtctattattgttctagatgggga |
| | | | ggggacggcttctatgctatggacTACtggggtcaaggaaccctggtcac |
| | | | cgtctcctcggcgtcgaccaagggcccatcggtcttccccctggcaccct |
| | | | cctccaagagcacctctgggggcacagcggccctgggctgcctggtcaag |
| | | | gactacttccccgaacctgtgacggtctcgtggaactcaggcgccctgac |
| | | | cagcggcgtgcacaccttcccggctgtcctacagtcctcaggactctact |
| | | | ccctcagcagcgtggtgaccgtgccctccagcagcttgggcacccagacc |
| | | | tacatctgcaacgtgaatcacaagcccagcaacaccaaggtggacaagaa |
| | | | agttgagcccCCCaaatcttgtgacaaaactcacacatgcccaccgtgcc |
| | | | cagcacctgaactcctggggggaccgtcagtcttcctcttccccccaaaa |
| | | | cccaaggacaccctcatgGCAtcccggacccctgaggtcacatgcgtggt |
| | | | ggtggacgtgagccacgaagaccctgaggtcaagttcaactggtacgtgg |
| | | | acggcgtggaggtgcataatgccaagacaaagccgcgggaggagcagtac |
| | | | aacagcacgtaccgtgtggtcagcgtcctcaccgtcctgGCCcaggactg |
| | | | gctgaatggcaaggagtacaagtgcaaggtctccaacaaagccctcccag |
| | | | cccccatcgagaaaaccatctccaaagccaaagggcagccccgagaacca |
| | | | caggtgtacaccctgcccccatcccgggatgagctgaccaagaaccaggt |
| | | | cagcctgacctgcctggtcaaaggcttctatcccagcgacatcgccgtgg |
| | | | agtgggagagcaatgggcagccggagaacaactacaagaccacgcctccc |
| | | | gtgctggactccgacggctccttcttcctctacagcaagctcaccgtgga |
| | | | caagagcaggtggcagcaggggaacgtcttctcatgctccgtgatgcatg |
| | | | aggctctgcacaaccactacacgcagaagagcctctccctgtctccgggt |
| | | | aaa |
| | 5205 | LC CDR1 | RASQDVNTAVA |
| | | (Kabat) | |
| | 5206 | LC CDR2 | SASFLYS |
| | | (Kabat) | |
| | 5207 | LC CDR3 | QQHYTTPPT |
| | | (Kabat) | |
| | 5208 | LC CDR1 | RASQDVNTAVA |
| | | (Chothia) | |
| | 5209 | LC CDR2 | SASFLYS |
| | | (Chothia) | |
| | 5210 | LC CDR3 | QQHYTTPPT |
| | | (Chothia) | |
| | 5196 | VL | DIQMTQSPSSLSASVGDRVTITCRASQDVNTAVAWYQQKPGKAPKLLIYS |
| | | | ASFLYSGVPSRFSGSRSGTDFTLTISSLQPEDFATYYCQQHYTTPPTFGQ |
| | | | GTKVEIK |
| | 5195 | DNA VL | gatatccagatgacccagtccccgagctccctgtccgcctctgtgggcga |
| | | | tagggtcaccatcacctgccgtgccagtcaggatgtgaatactgctgtag |
| | | | cctggtatcaacagaaaccaggaaaagctccgaaactactgatttactcg |
| | | | gcatccttcctcTACtctggagtcccttctcgcttctctggatccagatc |
| | | | tgggacggatttcactctgaccatcagcagtctgcagccggaagacttcg |
| | | | caacttattactgtcagcaacattatactactcctcccacgttcggacag |
| | | | ggtaccaaggtggagatcaaa |
| | 5198 | Light Chain | DIQMTQSPSSLSASVGDRVTITCRASQDVNTAVAWYQQKPGKAPKLLIYS |
| | | (hIgG1) | ASFLYSGVPSRFSGSRSGTDFTLTISSLQPEDFATYYCQQHYTTPPTFGQ |
| | | | GTKVEIKRTVAAPSVFIFPPSDEQLKSGTASVVCLLNNFYPREAKVQWKV |
| | | | DNALQSGNSQESVTEQDSKDSTYSLSSTLTLSKADYEKHKVYACEVTHQG |
| | | | LSSPVTKSFNRGEC |
| | 5197 | DNA Light | gatatccagatgacccagtccccgagctccctgtccgcctctgtgggcga |
| | | Chain | tagggtcaccatcacctgccgtgccagtcaggatgtgaatactgctgtag |
| | | (hIgG1) | cctggtatcaacagaaaccaggaaaagctccgaaactactgatttactcg |
| | | | gcatccttcctcTACtctggagtcccttctcgcttctctggatccagatc |
| | | | tgggacggatttcactctgaccatcagcagtctgcagccggaagacttcg |
| | | | caacttattactgtcagcaacattatactactcctcccacgttcggacag |
| | | | ggtaccaaggtggagatcaaacgaactgtggctgcaccatctgtcttcat |
| | | | cttcccgccatctgatgagcagttgaaatctggaactgcctctgttgtgt |
| | | | gcctgctgaataacttctatcccagagaggccaaagtacagtggaaggtg |
| | | | gataacgccctccaatcgggtaactcccaggagagtgtcacagagcagga |
| | | | cagcaaggacagcacctacagcctcagcagcaccctgacgctgagcaaag |
| | | | cagactacgagaaacacaaagtctacgcctgcgaagtcacccatcagggc |
| | | | ctgagctcgcccgtcacaaagagcttcaacaggggagagtgt |
| Ab-HER- | 5231 | HC CDR1 | DTYIH |
| 46 | | (Kabat) | |
| | 5232 | HC CDR2 | RIYPTNGYTRYADSVKG |
| | | (Kabat) | |
| | 5233 | HC CDR3 | WGGDGFYAMDY |
| | | (Kabat) | |
| | 5234 | HC CDR1 | GFNIKDT |
| | | (Chothia) | |
| | 5235 | HC CDR2 | YPTNGY |
| | | (Chothia) | |
| | 5236 | HC CDR3 | WGGDGFYAMDY |
| | | (Chothia) | |
| | 5224 | VH | EVQLVESGGGLVQPGGSLRLSCAASGFNIKDTYIHWVRQAPGKGLEWVAR |
| | | | IYPTNGYTRYADSVKGRFTISADTSKNTAYLQMNSLRAEDTAVYYCSRWG |
| | | | GDGFYAMDYWGQGTLVTVSS |
| | 5223 | DNA VH | gaggttcagctggtggagtctggcggtggcctggtgcagccagggggctc |
| | | | actccgtttgtcctgtgcagcttctggcttcaacattaaagacacctata |
| | | | tacactgggtgcgtcaggccccgggtaagggcctggaatgggttgcaagg |
| | | | atttatcctacgaatggttatactagatatgccgatagcgtcaagggccg |
| | | | tttcactataagcgcagacacatccaaaaacacagcctacctgcagatga |
| | | | acagcctgcgtgctgaggacactgccgtctattattgttctagatgggga |
| | | | ggggacggcttctatgctatggacTACtggggtcaaggaaccctggtcac |
| | | | cgtctcctcg |
| | 5226 | Heavy Chain | EVQLVESGGGLVQPGGSLRLSCAASGFNIKDTYIHWVRQAPGKGLEWVAR |
| | | (hIgG1) | IYPTNGYTRYADSVKGRFTISADTSKNTAYLQMNSLRAEDTAVYYCSRWG |
| | | | GDGFYAMDYWGQGTLVTVSSASTKGPSVFPLAPSSKSTSGGTAALGCLVK |
| | | | DYFPEPVTVSWNSGALTSGVHTFPAVLQSSGLYSLSSVVTVPSSSLGTQT |
| | | | YICNVNHKPSNTKVDKKVEPPKSCDKTHTCPPCPAPELLGGPSVFLFPPK |
| | | | PKDTLMASRTPEVTCVVVDVSHEDPEVKFNWYVDGVEVHNAKTKPREEQY |
| | | | NSTYRVVSVLTVLHQDWLNGKEYKCKVSNKALPAPIEKTISKAKGQPREP |
| | | | QVYTLPPSRDELTKNQVSLTCLVKGFYPSDIAVEWESNGQPENNYKTTPP |
| | | | VLDSDGSFFLYSKLTVDKSRWQQGNVFSCSVMHEALHNQYTQKSLSLSPG |
| | | | K |
| | 5225 | DNA Heavy | gaggttcagctggtggagtctggcggtggcctggtgcagccagggggctc |
| | | Chain | actccgtttgtcctgtgcagcttctggcttcaacattaaagacacctata |
| | | (hIgG1) | tacactgggtgcgtcaggccccgggtaagggcctggaatgggttgcaagg |
| | | | atttatcctacgaatggttatactagatatgccgatagcgtcaagggccg |
| | | | tttcactataagcgcagacacatccaaaaacacagcctacctgcagatga |
| | | | acagcctgcgtgctgaggacactgccgtctattattgttctagatgggga |
| | | | ggggacggcttctatgctatggacTACtggggtcaaggaaccctggtcac |
| | | | cgtctcctcggcgtcgaccaagggcccatcggtcttccccctggcaccct |
| | | | cctccaagagcacctctgggggcacagcggccctgggctgcctggtcaag |
| | | | gactacttccccgaacctgtgacggtctcgtggaactcaggcgccctgac |
| | | | cagcggcgtgcacaccttcccggctgtcctacagtcctcaggactctact |
| | | | ccctcagcagcgtggtgaccgtgccctccagcagcttgggcacccagacc |
| | | | tacatctgcaacgtgaatcacaagcccagcaacaccaaggtggacaagaa |
| | | | agttgagcccCCCaaatcttgtgacaaaactcacacatgcccaccgtgcc |
| | | | cagcacctgaactcctggggggaccgtcagtcttcctcttccccccaaaa |
| | | | cccaaggacaccctcatgGCAtcccggacccctgaggtcacatgcgtggt |
| | | | ggtggacgtgagccacgaagaccctgaggtcaagttcaactggtacgtgg |
| | | | acggcgtggaggtgcataatgccaagacaaagccgcgggaggagcagtac |
| | | | aacagcacgtaccgtgtggtcagcgtcctcaccgtcctgcaccaggactg |
| | | | gctgaatggcaaggagtacaagtgcaaggtctccaacaaagccctcccag |
| | | | cccccatcgagaaaaccatctccaaagccaaagggcagccccgagaacca |
| | | | caggtgtacaccctgcccccatcccgggatgagctgaccaagaaccaggt |
| | | | cagcctgacctgcctggtcaaaggcttctatcccagcgacatcgccgtgg |
| | | | agtgggagagcaatgggcagccggagaacaactacaagaccacgcctccc |
| | | | gtgctggactccgacggctccttcttcctctacagcaagctcaccgtgga |
| | | | caagagcaggtggcagcaggggaacgtcttctcatgctccgtgatgcatg |
| | | | aggctctgcacaacCAGtacacgcagaagagcctctccctgtctccgggt |
| | | | aaa |
| | 5237 | LC CDR1 | RASQDVNTAVA |
| | | (Kabat) | |
| | 5238 | LC CDR2 | SASFLYS |
| | | (Kabat) | |
| | 5239 | LC CDR3 | QQHYTTPPT |
| | | (Kabat) | |
| | 5240 | LC CDR1 | RASQDVNTAVA |
| | | (Chothia) | |
| | 5241 | LC CDR2 | SASFLYS |
| | | (Chothia) | |
| | 5242 | LC CDR3 | QQHYTTPPT |
| | | (Chothia) | |
| | 5228 | VL | DIQMTQSPSSLSASVGDRVTITCRASQDVNTAVAWYQQKPGKAPKLLIYS |
| | | | ASFLYSGVPSRFSGSRSGTDFTLTISSLQPEDFATYYCQQHYTTPPTFGQ |
| | | | GTKVEIK |
| | 5227 | DNA VL | gatatccagatgacccagtccccgagctccctgtccgcctctgtgggcga |
| | | | tagggtcaccatcacctgccgtgccagtcaggatgtgaatactgctgtag |
| | | | cctggtatcaacagaaaccaggaaaagctccgaaactactgatttactcg |
| | | | gcatccttcctcTACtctggagtcccttctcgcttctctggatccagatc |
| | | | tgggacggatttcactctgaccatcagcagtctgcagccggaagacttcg |
| | | | caacttattactgtcagcaacattatactactcctcccacgttcggacag |
| | | | ggtaccaaggtggagatcaaa |
| | 5230 | Light Chain | DIQMTQSPSSLSASVGDRVTITCRASQDVNTAVAWYQQKPGKAPKLLIYS |
| | | (hIgG1) | ASFLYSGVPSRFSGSRSGTDFTLTISSLQPEDFATYYCQQHYTTPPTFGQ |
| | | | GTKVEIKRTVAAPSVFIFPPSDEQLKSGTASVVCLLNNFYPREAKVQWKV |
| | | | DNALQSGNSQESVTEQDSKDSTYSLSSTLTLSKADYEKHKVYACEVTHQG |
| | | | LSSPVTKSFNRGEC |
| | 5229 | DNA Light | gatatccagatgacccagtccccgagctccctgtccgcctctgtgggcga |
| | | Chain | tagggtcaccatcacctgccgtgccagtcaggatgtgaatactgctgtag |
| | | (hIgG1) | cctggtatcaacagaaaccaggaaaagctccgaaactactgatttactcg |
| | | | gcatccttcctcTACtctggagtcccttctcgcttctctggatccagatc |
| | | | tgggacggatttcactctgaccatcagcagtctgcagccggaagacttcg |
| | | | caacttattactgtcagcaacattatactactcctcccacgttcggacag |
| | | | ggtaccaaggtggagatcaaacgaactgtggctgcaccatctgtcttcat |
| | | | cttcccgccatctgatgagcagttgaaatctggaactgcctctgttgtgt |
| | | | gcctgctgaataacttctatcccagagaggccaaagtacagtggaaggtg |
| | | | gataacgccctccaatcgggtaactcccaggagagtgtcacagagcagga |
| | | | cagcaaggacagcacctacagcctcagcagcaccctgacgctgagcaaag |
| | | | cagactacgagaaacacaaagtctacgcctgcgaagtcacccatcagggc |
| | | | ctgagctcgcccgtcacaaagagcttcaacaggggagagtgt |
| Ab-HER- | 5097 | HC CDR1 | DTYIH |
| 47 | | (Kabat) | |
| | 5098 | HC CDR2 | RIYPTNGYTRYADSVKG |
| | | (Kabat) | |
| | 5099 | HC CDR3 | WGGDGFYAMDY |
| | | (Kabat) | |
| | 5100 | HC CDR1 | GFNIKDT |
| | | (Chothia) | |
| | 5101 | HC CDR2 | YPTNGY |
| | | (Chothia) | |
| | 5102 | HC CDR3 | WGGDGFYAMDY |
| | | (Chothia) | |
| | 5090 | VH | EVQLVESGGGLVQPGGSLRLSCAASGFNIKDTYIHWVRQAPGKGLEWVAR |
| | | | IYPTNGYTRYADSVKGRFTISADTSKNTAYLQMNSLRAEDTAVYYCSRWG |
| | | | GDGFYAMDYWGQGTLVTVSS |
| | 5089 | DNA VH | gaggttcagctggtggagtctggcggtggcctggtgcagccagggggctc |
| | | | actccgtttgtcctgtgcagcttctggcttcaacattaaagacacctata |
| | | | tacactgggtgcgtcaggccccgggtaagggcctggaatgggttgcaagg |
| | | | atttatcctacgaatggttatactagatatgccgatagcgtcaagggccg |
| | | | tttcactataagcgcagacacatccaaaaacacagcctacctgcagatga |
| | | | acagcctgcgtgctgaggacactgccgtctattattgttctagatgggga |
| | | | ggggacggcttctatgctatggacTACtggggtcaaggaaccctggtcac |
| | | | cgtctcctcg |
| | 5092 | Heavy Chain | EVQLVESGGGLVQPGGSLRLSCAASGFNIKDTYIHWVRQAPGKGLEWVAR |
| | | (hIgG1) | IYPTNGYTRYADSVKGRFTISADTSKNTAYLQMNSLRAEDTAVYYCSRWG |
| | | | GDGFYAMDYWGQGTLVTVSSASTKGPSVFPLAPSSKSTSGGTAALGCLVK |
| | | | DYFPEPVTVSWNSGALTSGVHTFPAVLQSSGLYSLSSVVTVPSSSLGTQT |
| | | | YICNVNHKPSNTKVDKKVEPPKSCDKTHTCPPCPAPELLGGPSVFLFPPK |
| | | | PKDTLMASRTPEVTCVVVDVSHEDPEVKFNWYVDGVEVHNAKTKPREEQY |
| | | | NSTYRVVSVLTVLAQDWLNGKEYKCKVSNKALPAPIEKTISKAKGQPREP |
| | | | QVYTLPPSRDELTKNQVSLTCLVKGFYPSDIAVEWESNGQPENNYKTTPP |
| | | | VLDSDGSFFLYSKLTVDKSRWQQGNVFSCSVMHEALHNAYTQKSLSLSPG |
| | | | K |
| | 5091 | DNA Heavy | gaggttcagctggtggagtctggcggtggcctggtgcagccagggggctc |
| | | Chain | actccgtttgtcctgtgcagcttctggcttcaacattaaagacacctata |
| | | (hIgG1) | tacactgggtgcgtcaggccccgggtaagggcctggaatgggttgcaagg |
| | | | atttatcctacgaatggttatactagatatgccgatagcgtcaagggccg |
| | | | tttcactataagcgcagacacatccaaaaacacagcctacctgcagatga |
| | | | acagcctgcgtgctgaggacactgccgtctattattgttctagatgggga |
| | | | ggggacggcttctatgctatggacTACtggggtcaaggaaccctggtcac |
| | | | cgtctcctcggcgtcgaccaagggcccatcggtcttccccctggcaccct |
| | | | cctccaagagcacctctgggggcacagcggccctgggctgcctggtcaag |
| | | | gactacttccccgaacctgtgacggtctcgtggaactcaggcgccctgac |
| | | | cagcggcgtgcacaccttcccggctgtcctacagtcctcaggactctact |
| | | | ccctcagcagcgtggtgaccgtgccctccagcagcttgggcacccagacc |
| | | | tacatctgcaacgtgaatcacaagcccagcaacaccaaggtggacaagaa |
| | | | agttgagcccCCCaaatcttgtgacaaaactcacacatgcccaccgtgcc |
| | | | cagcacctgaactcctggggggaccgtcagtcttcctcttccccccaaaa |
| | | | cccaaggacaccctcatgGCAtcccggacccctgaggtcacatgcgtggt |
| | | | ggtggacgtgagccacgaagaccctgaggtcaagttcaactggtacgtgg |
| | | | acggcgtggaggtgcataatgccaagacaaagccgcgggaggagcagtac |
| | | | aacagcacgtaccgtgtggtcagcgtcctcaccgtcctgGCCcaggactg |
| | | | gctgaatggcaaggagtacaagtgcaaggtctccaacaaagccctcccag |
| | | | cccccatcgagaaaaccatctccaaagccaaagggcagccccgagaacca |
| | | | caggtgtacaccctgcccccatcccgggatgagctgaccaagaaccaggt |
| | | | cagcctgacctgcctggtcaaaggcttctatcccagcgacatcgccgtgg |
| | | | agtgggagagcaatgggcagccggagaacaactacaagaccacgcctccc |
| | | | gtgctggactccgacggctccttcttcctctacagcaagctcaccgtgga |
| | | | caagagcaggtggcagcaggggaacgtcttctcatgctccgtgatgcatg |
| | | | aggctctgcacaacGCTtacacgcagaagagcctctccctgtctccgggt |
| | | | aaa |
| | 5103 | LC CDR1 | RASQDVNTAVA |
| | | (Kabat) | |
| | 5104 | LC CDR2 | SASFLYS |
| | | (Kabat) | |
| | 5105 | LC CDR3 | QQHYTTPPT |
| | | (Kabat) | |
| | 5106 | LC CDR1 | RASQDVNTAVA |
| | | (Chothia) | |
| | 5107 | LC CDR2 | SASFLYS |
| | | (Chothia) | |
| | 5108 | LC CDR3 | QQHYTTPPT |
| | | (Chothia) | |
| | 5094 | VL | DIQMTQSPSSLSASVGDRVTITCRASQDVNTAVAWYQQKPGKAPKLLIYS |
| | | | ASFLYSGVPSRFSGSRSGTDFTLTISSLQPEDFATYYCQQHYTTPPTFGQ |
| | | | GTKVEIK |
| | 5093 | DNA VL | gatatccagatgacccagtccccgagctccctgtccgcctctgtgggcga |
| | | | tagggtcaccatcacctgccgtgccagtcaggatgtgaatactgctgtag |
| | | | cctggtatcaacagaaaccaggaaaagctccgaaactactgatttactcg |
| | | | gcatccttcctcTACtctggagtcccttctcgcttctctggatccagatc |
| | | | tgggacggatttcactctgaccatcagcagtctgcagccggaagacttcg |
| | | | caacttattactgtcagcaacattatactactcctcccacgttcggacag |
| | | | ggtaccaaggtggagatcaaa |
| | 5096 | Light Chain | DIQMTQSPSSLSASVGDRVTITCRASQDVNTAVAWYQQKPGKAPKLLIYS |
| | | (hIgG1) | ASFLYSGVPSRFSGSRSGTDFTLTISSLQPEDFATYYCQQHYTTPPTFGQ |
| | | | GTKVEIKRTVAAPSVFIFPPSDEQLKSGTASVVCLLNNFYPREAKVQWKV |
| | | | DNALQSGNSQESVTEQDSKDSTYSLSSTLTLSKADYEKHKVYACEVTHQG |
| | | | LSSPVTKSENRGEC |
| | 5095 | DNA Light | gatatccagatgacccagtccccgagctccctgtccgcctctgtgggcga |
| | | Chain | tagggtcaccatcacctgccgtgccagtcaggatgtgaatactgctgtag |
| | | (hIgG1) | cctggtatcaacagaaaccaggaaaagctccgaaactactgatttactcg |
| | | | gcatccttcctcTACtctggagtcccttctcgcttctctggatccagatc |
| | | | tgggacggatttcactctgaccatcagcagtctgcagccggaagacttcg |
| | | | caacttattactgtcagcaacattatactactcctcccacgttcggacag |
| | | | ggtaccaaggtggagatcaaacgaactgtggctgcaccatctgtcttcat |
| | | | cttcccgccatctgatgagcagttgaaatctggaactgcctctgttgtgt |
| | | | gcctgctgaataacttctatcccagagaggccaaagtacagtggaaggtg |
| | | | gataacgccctccaatcgggtaactcccaggagagtgtcacagagcagga |
| | | | cagcaaggacagcacctacagcctcagcagcaccctgacgctgagcaaag |
| | | | cagactacgagaaacacaaagtctacgcctgcgaagtcacccatcagggc |
| | | | ctgagctcgcccgtcacaaagagcttcaacaggggagagtgt |
| Ab-HER- | 5117 | HC CDR1 | DTYIH |
| 53 | | (Kabat) | |
| | 5118 | HC CDR2 | RIYPTNGYTRYADSVKG |
| | | (Kabat) | |
| | 5119 | HC CDR3 | WGGDGFYAMDY |
| | | (Kabat) | |
| | 5120 | HC CDR1 | GFNIKDT |
| | | (Chothia) | |
| | 5121 | HC CDR2 | YPTNGY |
| | | (Chothia) | |
| | 5122 | HC CDR3 | WGGDGFYAMDY |
| | | (Chothia) | |
| | 5110 | VH | EVQLVESGGGLVQPGGSLRLSCAASGFNIKDTYIHWVRQAPGKGLEWVAR |
| | | | IYPTNGYTRYADSVKGRFTISADTSKNTAYLQMNSLRAEDTAVYYCSRWG |
| | | | GDGFYAMDYWGQGTLVTVSS |
| | 5109 | DNA VH | gaggttcagctggtggagtctggcggtggcctggtgcagccagggggctc |
| | | | actccgtttgtcctgtgcagcttctggcttcaacattaaagacacctata |
| | | | tacactgggtgcgtcaggccccgggtaagggcctggaatgggttgcaagg |
| | | | atttatcctacgaatggttatactagatatgccgatagcgtcaagggccg |
| | | | tttcactataagcgcagacacatccaaaaacacagcctacctgcagatga |
| | | | acagcctgcgtgctgaggacactgccgtctattattgttctagatgggga |
| | | | ggggacggcttctatgctatggacTACtggggtcaaggaaccctggtcac |
| | | | cgtctcctcg |
| | 5112 | Heavy Chain | EVQLVESGGGLVQPGGSLRLSCAASGFNIKDTYIHWVRQAPGKGLEWVAR |
| | | (hIgG1) | IYPTNGYTRYADSVKGRFTISADTSKNTAYLQMNSLRAEDTAVYYCSRWG |
| | | | GDGFYAMDYWGQGTLVTVSSASTKGPSVFPLAPSSKSTSGGTAALGCLVK |
| | | | DYFPEPVTVSWNSGALTSGVHTFPAVLQSSGLYSLSSVVTVPSSSLGTQT |
| | | | YICNVNHKPSNTKVDKRVEPKSCDKTHTCPPCPAPELVGGPSVFLLPPKP |
| | | | KDTLMISRTPEVTCVVVDVSHEDPEVKFNWYVDGVEVHNAKTKPPEEQYN |
| | | | STLRVVSVLTVLHQDWLNGKEYKCKVSNKALPAPIEKTISKAKGQPREPQ |
| | | | VYTLPPSRDELTKNQVSLTCLVKGFYPSDIAVEWESNGQPENNYKTTPLV |
| | | | LDSDGSFFLYSKLTVDKSRWQQGNVFSCSVMHEALHNHYTQKSLSLSPGK |
| | 5111 | DNA Heavy | gaggttcagctggtggagtctggcggtggcctggtgcagccagggggctc |
| | | Chain | actccgtttgtcctgtgcagcttctggcttcaacattaaagacacctata |
| | | (hIgG1) | tacactgggtgcgtcaggccccgggtaagggcctggaatgggttgcaagg |
| | | | atttatcctacgaatggttatactagatatgccgatagcgtcaagggccg |
| | | | tttcactataagcgcagacacatccaaaaacacagcctacctgcagatga |
| | | | acagcctgcgtgctgaggacactgccgtctattattgttctagatgggga |
| | | | ggggacggcttctatgctatggacTACtggggtcaaggaaccctggtcac |
| | | | cgtctcctcggcgtcgaccaagggcccatcggtcttccccctggcaccct |
| | | | cctccaagagcacctctgggggcacagcggccctgggctgcctggtcaag |
| | | | gactacttccccgaacctgtgacggtctcgtggaactcaggcgccctgac |
| | | | cagcggcgtgcacaccttcccggctgtcctacagtcctcaggactctact |
| | | | ccctcagcagcgtggtgaccgtgccctccagcagcttgggcacccagacc |
| | | | tacatctgcaacgtgaatcacaagcccagcaacaccaaggtggacaagaG |
| | | | agttgagcccaaatcttgtgacaaaactcacacatgcccaccgtgcccag |
| | | | cacctgaactcGtggggggaccgtcagtcttcctcCtccccccaaaaccc |
| | | | aaggacaccctcatgatctcccggacccctgaggtcacatgcgtggtggt |
| | | | ggacgtgagccacgaagaccctgaggtcaagttcaactggtacgtggacg |
| | | | gcgtggaggtgcataatgccaagacaaagccgcCggaggagcagtacaac |
| | | | agcacgCTccgtgtggtcagcgtcctcaccgtcctgcaccaggactggct |
| | | | gaatggcaaggagtacaagtgcaaggtctccaacaaagccctcccagccc |
| | | | ccatcgagaaaaccatctccaaagccaaagggcagccccgagaaccacag |
| | | | gtgtacaccctgcccccatcccgggaTgagCtgaccaagaaccaggtcag |
| | | | cctgacctgcctggtcaaaggcttctatcccagcgacatcgccgtggagt |
| | | | gggagagcaatgggcagccggagaacaactacaagaccacgcctcTcgtg |
| | | | ctggactccgacggctccttcttcctctacagcaagctcaccgtggacaa |
| | | | gagcaggtggcagcaggggaacgtcttctcatgctccgtgatgcatgagg |
| | | | ctctgcacaaccactacacgcagaagagcctctccctgtctccgggtaaa |
| | 5123 | LC CDR1 | RASQDVNTAVA |
| | | (Kabat) | |
| | 5124 | LC CDR2 | SASFLYS |
| | | (Kabat) | |
| | 5125 | LC CDR3 | QQHYTTPPT |
| | | (Kabat) | |
| | 5126 | LC CDR1 | RASQDVNTAVA |
| | | (Chothia) | |
| | 5127 | LC CDR2 | SASFLYS |
| | | (Chothia) | |
| | 5128 | LC CDR3 | QQHYTTPPT |
| | | (Chothia) | |
| | 5114 | VL | DIQMTQSPSSLSASVGDRVTITCRASQDVNTAVAWYQQKPGKAPKLLIYS |
| | | | ASFLYSGVPSRFSGSRSGTDFTLTISSLQPEDFATYYCQQHYTTPPTFGQ |
| | | | GTKVEIK |
| | 5113 | DNA VL | gatatccagatgacccagtccccgagctccctgtccgcctctgtgggcga |
| | | | tagggtcaccatcacctgccgtgccagtcaggatgtgaatactgctgtag |
| | | | cctggtatcaacagaaaccaggaaaagctccgaaactactgatttactcg |
| | | | gcatccttcctcTACtctggagtcccttctcgcttctctggatccagatc |
| | | | tgggacggatttcactctgaccatcagcagtctgcagccggaagacttcg |
| | | | caacttattactgtcagcaacattatactactcctcccacgttcggacag |
| | | | ggtaccaaggtggagatcaaa |
| | 5116 | Light Chain | DIQMTQSPSSLSASVGDRVTITCRASQDVNTAVAWYQQKPGKAPKLLIYS |
| | | (hIgG1) | ASFLYSGVPSRFSGSRSGTDFTLTISSLQPEDFATYYCQQHYTTPPTFGQ |
| | | | GTKVEIKRTVAAPSVFIFPPSDEQLKSGTASVVCLLNNFYPREAKVQWKV |
| | | | DNALQSGNSQESVTEQDSKDSTYSLSSTLTLSKADYEKHKVYACEVTHQG |
| | | | LSSPVTKSFNRGEC |
| | 5115 | DNA Light | gatatccagatgacccagtccccgagctccctgtccgcctctgtgggcga |
| | | Chain | tagggtcaccatcacctgccgtgccagtcaggatgtgaatactgctgtag |
| | | (hIgG1) | cctggtatcaacagaaaccaggaaaagctccgaaactactgatttactcg |
| | | | gcatccttcctcTACtctggagtcccttctcgcttctctggatccagatc |
| | | | tgggacggatttcactctgaccatcagcagtctgcagccggaagacttcg |
| | | | caacttattactgtcagcaacattatactactcctcccacgttcggacag |
| | | | ggtaccaaggtggagatcaaacgaactgtggctgcaccatctgtcttcat |
| | | | cttcccgccatctgatgagcagttgaaatctggaactgcctctgttgtgt |
| | | | gcctgctgaataacttctatcccagagaggccaaagtacagtggaaggtg |
| | | | gataacgccctccaatcgggtaactcccaggagagtgtcacagagcagga |
| | | | cagcaaggacagcacctacagcctcagcagcaccctgacgctgagcaaag |
| | | | cagactacgagaaacacaaagtctacgcctgcgaagtcacccatcagggc |
| | | | ctgagctcgcccgtcacaaagagcttcaacaggggagagtgt |
| Ab-HER- | 5293 | HC CDR1 | DTYIH |
| 57 | | Kabat) | |
| | 5294 | HC CDR2 | RIYPTNGYTRYADSVKG |
| | | (Kabat) | |
| | 5295 | HC CDR3 | WGGDGFYAMDY |
| | | (Kabat) | |
| | 5296 | HC CDR1 | GFNIKDT |
| | | (Chothia) | |
| | 5297 | HC CDR2 | YPTNGY |
| | | (Chothia) | |
| | 5298 | HC CDR3 | WGGDGFYAMDY |
| | | (Chothia) | |
| | 5254 | VH | EVQLVESGGGLVQPGGSLRLSCAASGFNIKDTYIHWVRQAPGKGLEWVAR |
| | | | IYPTNGYTRYADSVKGRFTISADTSKNTAYLQMNSLRAEDTAVYYCSRWG |
| | | | GDGFYAMDYWGQGTLVTVSS |
| | 5253 | DNA VH | gaggttcagctggtggagtctggcggtggcctggtgcagccagggggctc |
| | | | actccgtttgtcctgtgcagcttctggcttcaacattaaagacacctata |
| | | | tacactgggtgcgtcaggccccgggtaagggcctggaatgggttgcaagg |
| | | | atttatcctacgaatggttatactagatatgccgatagcgtcaagggccg |
| | | | tttcactataagcgcagacacatccaaaaacacagcctacctgcagatga |
| | | | acagcctgcgtgctgaggacactgccgtctattattgttctagatgggga |
| | | | ggggacggcttctatgctatggacTACtggggtcaaggaaccctggtcac |
| | | | cgtctcctcg |
| | 5299 | LC CDR1 | RASQDVNTAVA |
| | | (Kabat) | |
| | 5300 | LC CDR2 | SASFLYS |
| | | (Kabat) | |
| | 5301 | LC CDR3 | QQHYTTPPT |
| | | (Kabat) | |
| | 5302 | LC CDR1 | RASQDVNTAVA |
| | | (Chothia) | |
| | 5303 | LC CDR2 | SASFLYS |
| | | (Chothia) | |
| | 5304 | LC CDR3 | QQHYTTPPT |
| | | (Chothia) | |
| | 5256 | VL | DIQMTQSPSSLSASVGDRVTITCRASQDVNTAVAWYQQKPGKAPKLLIYS |
| | | | ASFLYSGVPSRFSGSRSGTDFTLTISSLQPEDFATYYCQQHYTTPPTFGQ |
| | | | GTKVEIK |
| | 5255 | DNA VL | gatatccagatgacccagtccccgagctccctgtccgcctctgtgggcga |
| | | | tagggtcaccatcacctgccgtgccagtcaggatgtgaatactgctgtag |
| | | | cctggtatcaacagaaaccaggaaaagctccgaaactactgatttactcg |
| | | | gcatccttcctcTACtctggagtcccttctcgcttctctggatccagatc |
| | | | tgggacggatttcactctgaccatcagcagtctgcagccggaagacttcg |
| | | | caacttattactgtcagcaacattatactactcctcccacgttcggacag |
| | | | ggtaccaaggtggagatcaaa |
| | 5351 | scFv | EVQLVESGGGLVQPGGSLRLSCAASGFNIKDTYIHWVRQAPGKGLEWVAR |
| | | | IYPTNGYTRYADSVKGRFTISADTSKNTAYLQMNSLRAEDTAVYYCSRWG |
| | | | GDGFYAMDYWGQGTLVTVSSGGGGSGGGGSGGGGSDIQMTQSPSSLSASV |
| | | | GDRVTITCRASQDVNTAVAWYQQKPGKAPKLLIYSASFLYSGVPSRFSGS |
| | | | RSGTDFTLTISSLQPEDFATYYCQQHYTTPPTFGQGTKVEIK |
| | 5352 | scFv DNA | gaggttcagctggtggagtctggcggtggcctggtgcagccagggggctc |
| | | | actccgtttgtcctgtgcagcttctggcttcaacattaaagacacctata |
| | | | tacactgggtgcgtcaggccccgggtaagggcctggaatgggttgcaagg |
| | | | atttatcctacgaatggttatactagatatgccgatagcgtcaagggccg |
| | | | tttcactataagcgcagacacatccaaaaacacagcctacctgcagatga |
| | | | acagcctgcgtgctgaggacactgccgtctattattgttctagatgggga |
| | | | ggggacggcttctatgctatggacTACtggggtcaaggaaccctggtcac |
| | | | cgtctcctcgggtggtggtggatccggaggaggaggaAGTggaggtggag |
| | | | gtTCTgatatccagatgacccagtccccgagctccctgtccgcctctgtg |
| | | | ggcgatagggtcaccatcacctgccgtgccagtcaggatgtgaatactgc |
| | | | tgtagcctggtatcaacagaaaccaggaaaagctccgaaactactgattt |
| | | | actcggcatccttcctcTACtctggagtcccttctcgcttctctggatcc |
| | | | agatctgggacggatttcactctgaccatcagcagtctgcagccggaaga |
| | | | cttcgcaacttattactgtcagcaacattatactactcctcccacgttcg |
| | | | gacagggtaccaaggtggagatcaaa |
| Ab-HER- | 5305 | HC CDR1 | DYTMD |
| 62 | | (Kabat) | |
| | 5306 | HC CDR2 | DVNPNSGGSIYNQRFKG |
| | | (Kabat) | |
| | 5307 | HC CDR3 | NLGPSFYFDYW |
| | | (Kabat) | |
| | 5258 | VH | EVQLVESGGGLVQPGGSLRLSCAASGFTFTDYTMDWVRQAPGKGLEWVAD |
| | | | VNPNSGGSIYNQRFKGRFTLSVDRSKNTLYLQMNSLRAEDTAVYYCARNL |
| | | | GPSFYFDYWGQGTLVTVSS |
| | 5257 | DNA VH | gaggttcagctggtggagtctggcggtggcctggtgcagccagggggctc |
| | | | actccgtttgtcctgtgcagcttctggcttcaCcTTCaCCgacTATACCA |
| | | | TGGATtgggtgcgtcaggccccgggtaagggcctggaatgggttgcaGAC |
| | | | GTGAATcctAATTCTggtGGTTCTATAtatAATCAGCGTTTCaagggccg |
| | | | tttcactCTGagcGTTgacCGTtccaaaaacacaCTGtacctgcagatga |
| | | | acagcctgcgtgctgaggacactgccgtctattattgtGCAagaAATCTG |
| | | | gggCCTAGCttctatTTCgacTACtggggtcaaggaaccctggtcaccgt |
| | | | ctcctcg |
| | 5308 | LC CDR1 | KASQDVSIGVA |
| | | (Kabat) | |
| | 5309 | LC CDR2 | SASYRYT |
| | | (Kabat) | |
| | 5310 | LC CDR3 | QQYYIYPYT |
| | | (Kabat) | |
| | 5260 | VL | DIQMTQSPSSLSASVGDRVTITCKASQDVSIGVAWYQQKPGKAPKLLIYS |
| | | | ASYRYTGVPSRFSGSGSGTDFTLTISSLQPEDFATYYCQQYYIYPYTFGQ |
| | | | GTKVEIK |
| | 5259 | DNA VL | gatatccagatgacccagtccccgagctccctgtccgcctctgtgggcga |
| | | | tagggtcaccatcacctgcAAAgccagtcaggatgtgTCCATTGGGgtag |
| | | | cctggtatcaacagaaaccaggaaaagctccgaaactactgatttactcg |
| | | | gcatccTATCGCTACACGggagtcccttctcgcttctctggatccGGTtc |
| | | | tgggacggatttcactctgaccatcagcagtctgcagccggaagacttcg |
| | | | caacttattactgtcagcaaTACtatATCTATcctTACacgttcggacag |
| | | | ggtaccaaggtggagatcaaa |
| | 5349 | scFv | EVQLVESGGGLVQPGGSLRLSCAASGFTFTDYTMDWVRQAPGKGLEWVAD |
| | | | VNPNSGGSIYNQRFKGRFTLSVDRSKNTLYLQMNSLRAEDTAVYYCARNL |
| | | | GPSFYFDYWGQGTLVTVSSGGGGSGGGGSGGGGSDIQMTQSPSSLSASVG |
| | | | DRVTITCKASQDVSIGVAWYQQKPGKAPKLLIYSASYRYTGVPSRFSGSG |
| | | | SGTDFTLTISSLQPEDFATYYCQQYYIYPYTFGQGTKVEIK |
| | 5350 | scFv DNA | gaggttcagctggtggagtctggcggtggcctggtgcagccagggggctc |
| | | | actccgtttgtcctgtgcagcttctggcttcaCcTTCaCCgacTATACCA |
| | | | TGGATtgggtgcgtcaggccccgggtaagggcctggaatgggttgcaGAC |
| | | | GTGAATcctAATTCTggtGGTTCTATAtatAATCAGCGTTTCaagggccg |
| | | | tttcactCTGagcGTTgacCGTtccaaaaacacaCTGtacctgcagatga |
| | | | acagcctgcgtgctgaggacactgccgtctattattgtGCAagaAATCTG |
| | | | gggCCTAGCttctatTTCgacTACtggggtcaaggaaccctggtcaccgt |
| | | | ctcctcgggtggtggtggatccggaggaggaggaAGTggaggtggaggtT |
| | | | CTgatatccagatgacccagtccccgagctccctgtccgcctctgtgggc |
| | | | gatagggtcaccatcacctgcAAAgccagtcaggatgtgTCCATTGGGgt |
| | | | agcctggtatcaacagaaaccaggaaaagctccgaaactactgatttact |
| | | | cggcatccTATCGCTACACGggagtcccttctcgcttctctggatccGGT |
| | | | tctgggacggatttcactctgaccatcagcagtctgcagccggaagactt |
| | | | cgcaacttattactgtcagcaaTACtatATCTATcctTACacgttcggac |
| | | | agggtaccaaggtggagatcaaa |
| Ab-HER- | 5137 | HC CDR1 | DTYIH |
| 69 | | (Kabat) | |
| | 5138 | HC CDR2 | RIYPTNGYTRYDPKFQD |
| | | (Kabat) | |
| | 5139 | HC CDR3 | WGGDGFYAMDY |
| | | (Kabat) | |
| | 5140 | HC CDR1 | GFNIKDT |
| | | (Chothia) | |
| | 5141 | HC CDR2 | YPTNGY |
| | | (Chothia) | |
| | 5142 | HC CDR3 | WGGDGFYAMDY |
| | | (Chothia) | |
| | 5130 | VH | QVQLQQSGPELVKPGASLKLSCTASGFNIKDTYIHWVKQRPEQGLEWIGR |
| | | | IYPTNGYTRYDPKFQDKATITADTSSNTAYLQVSRLTSEDTAVYYCSRWG |
| | | | GDGFYAMDYWGQGASVTVSS |
| | 5129 | DNA VH | CAGGTGCAGCTGCAGCAGAGCGGCCCCGAGCTGGTGAAGCCCGGCGCCAG |
| | | | CCTGAAGCTGAGCTGCACCGCCAGCGGCTTCAACATCAAGGACACCTACA |
| | | | TCCACTGGGTGAAGCAGAGACCCGAGCAGGGCCTGGAGTGGATCGGCAGA |
| | | | ATCTACCCCACCAACGGCTACACCAGATACGACCCCAAGTTCCAGGACAA |
| | | | GGCCACCATCACCGCCGACACCAGCAGCAACACCGCCTACCTGCAGGTGA |
| | | | GCAGACTGACCAGCGAGGACACCGCCGTGTACTACTGCAGCAGATGGGGC |
| | | | GGCGACGGCTTCTACGCCATGGACTACTGGGGCCAGGGCGCCAGCGTGAC |
| | | | CGTGAGCAGC |
| | 5132 | Heavy Chain | QVQLQQSGPELVKPGASLKLSCTASGFNIKDTYIHWVKQRPEQGLEWIGR |
| | | (hIgG1) | IYPTNGYTRYDPKFQDKATITADTSSNTAYLQVSRLTSEDTAVYYCSRWG |
| | | | GDGFYAMDYWGQGASVTVSSASTKGPSVFPLAPSSKSTSGGTAALGCLVK |
| | | | DYFPEPVTVSWNSGALTSGVHTFPAVLQSSGLYSLSSVVTVPSSSLGTQT |
| | | | YICNVNHKPSNTKVDKRVEPKSCDKTHTCPPCPAPELVGGPSVFLLPPKP |
| | | | KDTLMISRTPEVTCVVVDVSHEDPEVKFNWYVDGVEVHNAKTKPPEEQYN |
| | | | STLRVVSVLTVLHQDWLNGKEYKCKVSNKALPAPIEKTISKAKGQPREPQ |
| | | | VYTLPPSRDELTKNQVSLTCLVKGFYPSDIAVEWESNGQPENNYKTTPLV |
| | | | LDSDGSFFLYSKLTVDKSRWQQGNVFSCSVMHEALHNHYTQKSLSLSPGK |
| | 5131 | DNA Heavy | CAGGTGCAGCTGCAGCAGAGCGGCCCCGAGCTGGTGAAGCCCGGCGCCAG |
| | | Chain | CCTGAAGCTGAGCTGCACCGCCAGCGGCTTCAACATCAAGGACACCTACA |
| | | (hIgG1) | TCCACTGGGTGAAGCAGAGACCCGAGCAGGGCCTGGAGTGGATCGGCAGA |
| | | | ATCTACCCCACCAACGGCTACACCAGATACGACCCCAAGTTCCAGGACAA |
| | | | GGCCACCATCACCGCCGACACCAGCAGCAACACCGCCTACCTGCAGGTGA |
| | | | GCAGACTGACCAGCGAGGACACCGCCGTGTACTACTGCAGCAGATGGGGC |
| | | | GGCGACGGCTTCTACGCCATGGACTACTGGGGCCAGGGCGCCAGCGTGAC |
| | | | CGTGAGCAGCgcgtcgaccaagggcccatcggtcttccccctggcaccct |
| | | | cctccaagagcacctctgggggcacagcggccctgggctgcctggtcaag |
| | | | gactacttccccgaacctgtgacggtctcgtggaactcaggcgccctgac |
| | | | cagcggcgtgcacaccttcccggctgtcctacagtcctcaggactctact |
| | | | ccctcagcagcgtggtgaccgtgccctccagcagcttgggcacccagacc |
| | | | tacatctgcaacgtgaatcacaagcccagcaacaccaaggtggacaagaG |
| | | | agttgagcccaaatcttgtgacaaaactcacacatgcccaccgtgcccag |
| | | | cacctgaactcGtggggggaccgtcagtcttcctcCtccccccaaaaccc |
| | | | aaggacaccctcatgatctcccggacccctgaggtcacatgcgtggtggt |
| | | | ggacgtgagccacgaagaccctgaggtcaagttcaactggtacgtggacg |
| | | | gcgtggaggtgcataatgccaagacaaagccgcCggaggagcagtacaac |
| | | | agcacgCTccgtgtggtcagcgtcctcaccgtcctgcaccaggactggct |
| | | | gaatggcaaggagtacaagtgcaaggtctccaacaaagccccccagccc |
| | | | ccatcgagaaaaccatctccaaagccaaagggcagccccgagaaccacag |
| | | | gtgtacaccctgcccccatcccgggaTgagCtgaccaagaaccaggtcag |
| | | | cctgacctgcctggtcaaaggcttctatcccagcgacatcgccgtggagt |
| | | | gggagagcaatgggcagccggagaacaactacaagaccacgcctcTcgtg |
| | | | ctggactccgacggctccttcttcctctacagcaagctcaccgtggacaa |
| | | | gagcaggtggcagcaggggaacgtcttctcatgctccgtgatgcatgagg |
| | | | ctctgcacaaccactacacgcagaagagcctctccctgtctccgggtaaa |
| | 5143 | LC CDR1 | KASQDVNTAVA |
| | | (Kabat) | |
| | 5144 | LC CDR2 | SASFRYT |
| | | (Kabat) | |
| | 5145 | LC CDR3 | QQHYTTPPT |
| | | (Kabat) | |
| | 5146 | LC CDR1 | KASQDVNTAVA |
| | | (Chothia) | |
| | 5147 | LC CDR2 | SASFRYT |
| | | (Chothia) | |
| | 5148 | LC CDR3 | QQHYTTPPT |
| | | (Chothia) | |
| | 5134 | VL | DIVMTQSHKFMSTSVGDRVSITCKASQDVNTAVAWYQQKPGHSPKLLIYS |
| | | | ASFRYTGVPDRFTGSRSGTDFTFTISSVQAEDLAVYYCQQHYTTPPTFGG |
| | | | GTKVEIK |
| | 5133 | DNA VL | GACATCGTGATGACCCAGAGCCACAAGTTCATGAGCACCAGCGTGGGCGA |
| | | | CAGAGTGAGCATCACCTGCAAGGCCAGCCAGGACGTGAACACCGCCGTGG |
| | | | CCTGGTACCAGCAGAAGCCCGGCCACAGCCCCAAGCTGCTGATCTACAGC |
| | | | GCCAGCTTCAGATACACCGGCGTGCCGGACAGATTCACCGGCAGCAGAAG |
| | | | CGGCACCGACTTCACCTTCACCATCAGCAGCGTGCAGGCCGAGGACCTGG |
| | | | CCGTGTACTACTGCCAGCAGCACTACACCACCCCTCCTACCTTCGGCGGC |
| | | | GGCACCAAGGTGGAGATCAAG |
| | 5136 | Light Chain | DIVMTQSHKFMSTSVGDRVSITCKASQDVNTAVAWYQQKPGHSPKLLIYS |
| | | (hIgG1) | ASFRYTGVPDRFTGSRSGTDFTFTISSVQAEDLAVYYCQQHYTTPPTFGG |
| | | | GTKVEIKRTVAAPSVFIFPPSDEQLKSGTASVVCLLNNFYPREAKVQWKV |
| | | | DNALQSGNSQESVTEQDSKDSTYSLSSTLTLSKADYEKHKVYACEVTHQG |
| | | | LSSPVTKSENRGEC |
| | 5135 | DNA Light | GACATCGTGATGACCCAGAGCCACAAGTTCATGAGCACCAGCGTGGGCGA |
| | | Chain | CAGAGTGAGCATCACCTGCAAGGCCAGCCAGGACGTGAACACCGCCGTGG |
| | | (hIgG1) | CCTGGTACCAGCAGAAGCCCGGCCACAGCCCCAAGCTGCTGATCTACAGC |
| | | | GCCAGCTTCAGATACACCGGCGTGCCGGACAGATTCACCGGCAGCAGAAG |
| | | | CGGCACCGACTTCACCTTCACCATCAGCAGCGTGCAGGCCGAGGACCTGG |
| | | | CCGTGTACTACTGCCAGCAGCACTACACCACCCCTCCTACCTTCGGCGGC |
| | | | GGCACCAAGGTGGAGATCAAGAGAACCGTGGCCGCCCCTAGCGTGTTCAT |
| | | | CTTCCCGCCAAGCGACGAGCAGCTGAAGAGCGGCACCGCCAGCGTGGTGT |
| | | | GCCTGCTGAACAACTTCTACCCCAGAGAGGCCAAGGTGCAGTGGAAGGTG |
| | | | GACAACGCCCTGCAGAGCGGCAACAGCCAGGAGAGCGTGACCGAGCAGGA |
| | | | CAGCAAGGACAGCACCTACAGCCTGAGCAGCACCCTGACCCTGAGCAAGG |
| | | | CCGACTACGAGAAGCACAAGGTGTACGCCTGCGAGGTGACCCACCAGGGC |
| | | | CTGAGCAGCCCCGTGACCAAGAGCTTCAACAGAGGCGAGTGCt |
| AB-HER- | 5311 | HC CDR1 | GYFIN |
| 73 | | (Kabat) | |
| | 5312 | HC CDR2 | HISSSYATSTYNQKFQ |
| | | (Kabat) | |
| | 5313 | HC CDR3 | YCVRSGNY |
| | | (Kabat) | |
| | 5314 | HC CDR1 | GYSFTGY |
| | | (Chothia) | |
| | 5315 | HC CDR2 | SSSYA |
| | | (Chothia) | |
| | 5316 | HC CDR3 | YCVRSGNY |
| | | (Chothia) | |
| | 5358 | HC CDR1 | GYSFTGYFIN |
| | 5359 | HC CDR2 | HISSSYATSTYNQKFQG |
| | 5360 | HC CDR3 | SGNYEEYAMDY |
| | 5262 | VH | QVQLVQSGAEVKKPGASVKVSCKASGYSFTGYFINWVREAPGQGLEWMGH |
| | | | ISSSYATSTYNQKFQGRVTFTVDTSSSTAYMELSSLRSEDTAVYYCVRSG |
| | | | NYEEYAMDYWGQGTLVTVSS |
| | 5261 | DNA VH | CAAgttcagctggtgCAGtctggTGCAGAAGTTAAGAAGccagggGCAtc |
| | | | aGTAAAGGTGTCCtgCAAGgcttctggcTACTCTTTCACTGGGTATTTCa |
| | | | taAATtgggtgAGAGAGgccccCGGCCAGggcctggaatggATGGGCCAT |
| | | | attTCCTCCTCTTATGCAACTTCTACAtatAACCAGAAGTTTCAGggcAG |
| | | | AGTCactTTCACTGTGgacacatccAGCTCTacagcctacATGGAGCTGT |
| | | | CAagcctgAGATCTgaggacactgcagtctattattgtGTGagaAGTgga |
| | | | AACTAtGAAGAGTATgctatggacTACtggggtcaaggaaccctggtcac |
| | | | AgtctcctcA |
| | 5264 | Heavy Chain | QVQLVQSGAEVKKPGASVKVSCKASGYSFTGYFINWVREAPGQGLEWMGH |
| | | (hIgG1) | ISSSYATSTYNQKFQGRVTFTVDTSSSTAYMELSSLRSEDTAVYYCVRSG |
| | | | NYEEYAMDYWGQGTLVTVSSASTKGPSVFPLAPSSKSTSGGTAALGCLVK |
| | | | DYFPEPVTVSWNSGALTSGVHTFPAVLQSSGLYSLSSVVTVPSSSLGTQT |
| | | | YICNVNHKPSNTKVDKKVEPPKSCDKTHTCPPCPAPELLGGPSVFLFPPK |
| | | | PKDTLMISRTPEVTCVVVDVSHEDPEVKFNWYVDGVEVHNAKTKPREEQY |
| | | | NSTYRVVSVLTVLHQDWLNGKEYKCKVSNKALPAPIEKTISKAKGQPREP |
| | | | QVYTLPPSRDELTKNQVSLTCLVKGFYPSDIAVEWESNGQPENNYKTTPP |
| | | | VLDSDGSFFLYSKLTVDKSRWQQGNVFSCSVMHEALHNHYTQKSLSLSPG |
| | | | KRKRREGRGSLLTCGDVEENPGPMDMRVPAQLLGLLLLWLSGARCEVQLV |
| | | | ESGGGLVQPGGSLRLSCAASGFNIKDTYIHWVRQAPGKGLEWVARIYPTN |
| | | | GYTRYADSVKGRFTISADTSKNTAYLQMNSLRAEDTAVYYCSRWGGDGFY |
| | | | AMDYWGQGTLVTVSS |
| | 5263 | DNA Heavy | CAAgttcagctggtgCAGtctggTGCAGAAGTTAAGAAGccagggGCAtc |
| | | Chain | aGTAAAGGTGTCCtgCAAGgcttctggcTACTCTTTCACTGGGTATTTCa |
| | | (hIgG1) | taAATtgggtgAGAGAGgccccCGGCCAGggcctggaatggATGGGCCAT |
| | | | attTCCTCCTCTTATGCAACTTCTACAtatAACCAGAAGTTTCAGggcAG |
| | | | AGTCactTTCACTGTGgacacatccAGCTCTacagcctacATGGAGCTGT |
| | | | CAagcctgAGATCTgaggacactgcagtctattattgtGTGagaAGTgga |
| | | | AACTAtGAAGAGTATgctatggacTACtggggtcaaggaaccctggtcac |
| | | | AgtctcctcAgcCtcTaccaagggcccatcTgtcttccccctggcaccct |
| | | | cctccaagagcacctctgggggcacagcAgccctgggctgcctggtcaag |
| | | | gactacttcccTgaacctgtgacAgtctcTtggaactcaggGgccctgac |
| | | | cTCTggGgtgcacaccttcccAgctgtcctacagtcctcaggactctact |
| | | | ccctcTCTTCTgtggtgacAgtgccctccagcagcttgggcacccagacc |
| | | | tacatctgcaaTgtgaatcacaagcccagcaacaccaaggtggacaagaa |
| | | | agttgagcccCCCaaatcttgtgacaaaactcacacatgcccaccCtgcc |
| | | | cagcacctgaactcctggggggaccCtcagtcttcctcttccccccaaaa |
| | | | cccaaggacaccctcatgatctccAGAacccctgaggtcacatgTgtggt |
| | | | ggtggaTgtgagccaTgaagaccctgaggtcaagttcaactggtaTgtgg |
| | | | aTggGgtggaggtgcataatgccaagacaaagccCAGAgaggagcagtac |
| | | | aacagcacCtacAGAgtggtcTCAgtcctcacTgtcctgcaccaggactg |
| | | | gctgaatggcaaggagtacaagtgcaaggtctccaacaaagccctcccag |
| | | | cccccatAgagaaaaccatctccaaagccaaagggcagcccAGAgaacca |
| | | | caggtgtacaccctgcccccatccAGAgatgagctgaccaagaaccaggt |
| | | | cagcctgacctgcctggtcaaaggcttctatcccTCTgacatTgcTgtgg |
| | | | agtgggagagcaatgggcagccAgagaacaactacaagaccacCcctccA |
| | | | gtgctggactcTgatggctccttcttcctctacagcaagctcacAgtgga |
| | | | caagagcaggtggcagcaggggaaTgtcttctcatgctcIgtgatgcatg |
| | | | aggctctgcacaaccactacacTcagaagagcctctccctgtctccTggt |
| | | | aaa |
| | 5355 | LC CDR1 | RSSQTLLYSNNQKNYLA |
| | 5356 | LC CDR2 | WAFTRKS |
| | 5357 | LC CDR3 | QQYSNYPWT |
| | 5354 | VL | DIVLTQSPDSLAVSLGERATINCRSSQTLLYSNNQKNYLAWYQKKPGQPP |
| | | | KLLISWAFTRKSGVPDRFSGSGSGTDFTLTISSLQAEDVAVYYCQQYSNY |
| | | | PWTFGQGTKVEIK |
| | 5353 | DNA VL | gatatTGTACTGacccagtccccTGACtccctgGCTGTGtctCTGggGGA |
| | | | AaggGCAaccatcAACtgcAGGAGTagtcagACCCTTCTGTACTCTAATA |
| | | | ACCAGAAAAACTACCTGgcctggtatcaaAAAaaaccaggaCAGCCTccT |
| | | | aaactactgattAGTTGGgcaTTCACTAGGAAGtctggagtccctGACAG |
| | | | GttctctggatcTGGGtcTggAacAgatttcacActgaccatcagcagtc |
| | | | tgcagGCTgaagaTGTTgcaGTCtaCtactgtcagcaaTACTCAAACTAC |
| | | | cctTGGacTttTggacagggGaccaaAgtggagatcaaa |
| | 5268 | Light Chain | DIVLTQSPDSLAVSLGERATINCRSSQTLLYSNNQKNYLAWYQKKPGQPP |
| | | (hIgG1) | KLLISWAFTRKSGVPDRFSGSGSGTDFTLTISSLQAEDVAVYYCQQYSNY |
| | | | PWTFGQGTKVEIKRTVAAPSVFIFPPSDEQLKSGTASVKCLLNNFYPREA |
| | | | KVQWKVDNALQSGNSQESVTEQDSKDSTYSLSSTLTLSKADYEKHKVYAC |
| | | | EVTHQGLSSPVTKSENRGEC |
| | 5267 | DNA Light | gatatTGTACTGacccagtccccTGACtccctgGCTGTGtctCTGggGGA |
| | | Chain | AaggGCAaccatcAACtgcAGGAGTagtcagACCCTTCTGTACTCTAATA |
| | | (hIgG1) | ACCAGAAAAACTACCTGgcctggtatcaaAAAaaaccaggaCAGCCTccT |
| | | | aaactactgattAGTTGGgcaTTCACTAGGAAGtctggagtccctGACAG |
| | | | GttctctggatcTGGGtcTggAacAgatttcacActgaccatcagcagtc |
| | | | tgcagGCTgaagaTGTTgcaGTCtaCtactgtcagcaaTACTCAAACTAC |
| | | | cctTGGacTttIggacagggGaccaaAgtggagatcaaaAGGactgtCgc |
| | | | tgcaccatctgtcttcatcttcccAccatctgatgagcagttgaaatctg |
| | | | gaactgcctctgttAAGtgcctgctgaataacttctatcccagagaggcc |
| | | | aaagtacagtggaaggtggataaTgccctccaaAGTggtaactcccagga |
| | | | gagtgtcacagagcaggacagcaaggacagcacctacagcctcagcagca |
| | | | ccctgacCctgagcaaagcagactaTgagaaacacaaagtctaTgcctgT |
| | | | gaagtcacccatcagggcctgagcAGCccAgtcacaaagagcttcaacag |
| | | | gggagagtgt |
| | 5037 | HC CDR1 | DTYIH |
| | | (Kabat) | |
| | 5038 | HC CDR2 | RIYPTNGYTRYADSVKG |
| | | (Kabat) | |
| | 5039 | HC CDR3 | WGGDGFYAMDY |
| | | (Kabat) | |
| | 5040 | HC CDR1 | GFNIKDT |
| | | (Chothia) | |
| | 5041 | HC CDR2 | YPTNGY |
| | | (Chothia) | |
| | 5042 | HC CDR3 | WGGDGFYAMDY |
| | | (Chothia) | |
| | 5361 | HC CDR1 | GFNIKDTYIH |
| | 5362 | HC CDR2 | RIYPTNGYTRYADSVKG |
| | 5363 | HC CDR3 | WGGDGFYAMDY |
| | 5290 | VH | EVQLVESGGGLVQPGGSLRLSCAASGFNIKDTYIHWVRQAPGKGLEWVAR |
| | | | IYPTNGYTRYADSVKGRFTISADTSKNTAYLQMNSLRAEDTAVYYCSRWG |
| | | | GDGFYAMDYWGQGTLVTVSS |
| | 6552 | DNA VH | gaggttcagctggtggagtctggTggtggcctGgtgcagccagggggctc |
| | | | actcAGAttgtcctgtgcagcttctggcttcaacattaaagacacctata |
| | | | tacactgggtgAGAcaggccccTggAaagggcctggaatgggttgcaagg |
| | | | atttatcctacTaatggttatactagatatgcAgatagTgtcaagggcAG |
| | | | AttcactataagTgcagacacatccaaaaacacagcctacctgcagatga |
| | | | acagcctgAGAgctgaggacactgcAgtctattattgttctagatgggga |
| | | | ggggaTggcttctatgctatggacTACtggggtcaaggaaccctggtcac |
| | | | AgtctcctcT |
| | 5317 | LC CDR1 | RASQDVNTAVA |
| | | (Kabat) | |
| | 5318 | LC CDR2 | SASFLYS |
| | | (Kabat) | |
| | 5319 | LC CDR3 | QQHYTTPPT |
| | | Kabat) | |
| | 5320 | LC CDR1 | RASQDVNTAVA |
| | | (Chothia) | |
| | 5321 | LC CDR2 | SASFLYS |
| | | (Chothia) | |
| | 5322 | LC CDR3 | QQHYTTPPT |
| | | (Chothia) | |
| | 5266 | VL | DIQMTQSPSSLSASVGDRVTITCRASQDVNTAVAWYQQKPGKAPKLLIYS |
| | | | ASFLYSGVPSRFSGSRSGTDFTLTISSLQPEDFATYYCQQHYTTPPTFGQ |
| | | | GTKVEIK |
| | 5265 | DNA VL | gatatccagatgacccagtccccAagctccctgtcTgcctctgtgggGga |
| | | | tagggtcaccatcacctgcAGAgccagtcaggatgtgaatactgctgtag |
| | | | cctggtatcaacagaaaccaggaaaagctccCaaactactgatttactcT |
| | | | gcatccttcctcTACtctggagtcccttctAGAttctctggatccagatc |
| | | | tggCacTgaCttcactctgaccatcagTagtctgcagccTgaagacttTg |
| | | | caacttattactgtcaAcaacattatactactcctcccacCttTggacag |
| | | | ggtaccaaggtggagatcaaa |
| | 5351 | scFv | EVQLVESGGGLVQPGGSLRLSCAASGFNIKDTYIHWVRQAPGKGLEWVAR |
| | | | IYPTNGYTRYADSVKGRFTISADTSKNTAYLQMNSLRAEDTAVYYCSRWG |
| | | | GDGFYAMDYWGQGTLVTVSSGGGGSGGGGSGGGGSDIQMTQSPSSLSASV |
| | | | GDRVTITCRASQDVNTAVAWYQQKPGKAPKLLIYSASFLYSGVPSRFSGS |
| | | | RSGTDFTLTISSLQPEDFATYYCQQHYTTPPTFGQGTKVEIK |
| | 5364 | scFv DNA | gaggttcagctggtggagtctggTggtggcctGgtgcagccagggggctc |
| | | | actcAGAttgtcctgtgcagcttctggcttcaacattaaagacacctata |
| | | | tacactgggtgAGAcaggccccTggAaagggcctggaatgggttgcaagg |
| | | | atttatcctacTaatggttatactagatatgcAgatagTgtcaagggcAG |
| | | | AttcactataagTgcagacacatccaaaaacacagcctacctgcagatga |
| | | | acagcctgAGAgctgaggacactgcAgtctattattgttctagatgggga |
| | | | ggggaTggcttctatgctatggacTACtggggtcaaggaaccctggtcac |
| | | | AgtctcctcTggtggtggtggatcTggaggaggaggaAGTggaggtggag |
| | | | gtTCTgatatccagatgacccagtccccAagctccctgtcTgcctctgtg |
| | | | ggGgatagggtcaccatcacctgcAGAgccagtcaggatgtgaatactgc |
| | | | tgtagcctggtatcaacagaaaccaggaaaagctccCaaactactgattt |
| | | | actcTgcatccttcctcTACtctggagtcccttctAGAttctctggatcc |
| | | | agatctggCacTgaCttcactctgaccatcagTagtctgcagccTgaaga |
| | | | cttTgcaacttattactgtcaAcaacattatactactcctcccacCttTg |
| | | | gacagggtaccaaggtggagatcaaa |
| | 5365 | Light Chain | EVQLVESGGGLVQPGGSLRLSCAASGFNIKDTYIHWVRQAPGKGLEWVAR |
| | | | IYPTNGYTRYADSVKGRFTISADTSKNTAYLQMNSLRAEDTAVYYCSRWG |
| | | | GDGFYAMDYWGQGTLVTVSSGGGGSGGGGSGGGGSDIQMTQSPSSLSASV |
| | | | GDRVTITCRASQDVNTAVAWYQQKPGKAPKLLIYSASFLYSGVPSRFSGS |
| | | | RSGTDFTLTISSLQPEDFATYYCQQHYTTPPTFGQGTKVEIKGSDIVLTQ |
| | | | SPDSLAVSLGERATINCRSSQTLLYSNNQKNYLAWYQKKPGQPPKLLISW |
| | | | AFTRKSGVPDRFSGSGSGTDFTLTISSLQAEDVAVYYCQQYSNYPWTFGQ |
| | | | GTKVEIKRTVAAPSVFIFPPSDEQLKSGTASVKCLLNNFYPREAKVQWKV |
| | | | DNALQSGNSQESVTEQDSKDSTYSLSSTLTLSKADYEKHKVYACEVTHQG |
| | | | LSSPVTKSFNRGEC |
| | 5366 | DNA Light | gaggttcagctggtggagtctggTggtggcctGgtgcagccagggggctc |
| | | Chain | actcAGAttgtcctgtgcagcttctggcttcaacattaaagacacctata |
| | | | tacactgggtgAGAcaggccccTggAaagggcctggaatgggttgcaagg |
| | | | atttatcctacTaatggttatactagatatgcAgatagTgtcaagggcAG |
| | | | AttcactataagTgcagacacatccaaaaacacagcctacctgcagatga |
| | | | acagcctgAGAgctgaggacactgcAgtctattattgttctagatgggga |
| | | | ggggaTggcttctatgctatggacTACtggggtcaaggaaccctggtcac |
| | | | AgtctcctcTggtggtggtggatcTggaggaggaggaAGTggaggtggag |
| | | | gtTCTgatatccagatgacccagtccccAagctccctgtcTgcctctgtg |
| | | | ggGgatagggtcaccatcacctgcAGAgccagtcaggatgtgaatactgc |
| | | | tgtagcctggtatcaacagaaaccaggaaaagctccCaaactactgattt |
| | | | actcTgcatccttcctcTACtctggagtcccttctAGAttctctggatcc |
| | | | agatctggCacTgaCttcactctgaccatcagTagtctgcagccTgaaga |
| | | | cttTgcaacttattactgtcaAcaacattatactactcctcccacCttTg |
| | | | gacagggtaccaaggtggagatcaaaGGCTCTgatatTGTACTGacccag |
| | | | tccccTGACtccctgGCTGTGtctCTGggGGAAaggGCAaccatcAACtg |
| | | | CAGGAGTagtcagACCCTTCTGTACTCTAATAACCAGAAAAACTACCTGg |
| | | | cctggtatcaaAAAaaaccaggaCAGCCTccTaaactactgattAGTTGG |
| | | | gcaTTCACTAGGAAGtctggagtccctGACAGGttctctggatcTGGGtc |
| | | | TggAacAgatttcacActgaccatcagcagtctgcagGCTgaagaTGTTg |
| | | | caGTCtaCtactgtcagcaaTACTCAAACTACcctTGGacTttTggacag |
| | | | ggGaccaaAgtggagatcaaaAGGactgtCgctgcaccatctgtcttcat |
| | | | cttcccAccatctgatgagcagttgaaatctggaactgcctctgttAAGt |
| | | | gcctgctgaataacttctatcccagagaggccaaagtacagtggaaggtg |
| | | | gataaTgccctccaaAGTggtaactcccaggagagtgtcacagagcagga |
| | | | cagcaaggacagcacctacagcctcagcagcaccctgacCctgagcaaag |
| | | | cagactaTgagaaacacaaagtctaTgcctgTgaagtcacccatcagggc |
| | | | ctgagcAGCccAgtcacaaagagcttcaacaggggagagtgt |
| Ab-HER- | 5281 | HC CDR1 | DTYIH |
| 75 | | (Kabat) | |
| | 5282 | HC CDR2 | RIYPTNGYTRYADSVKG |
| | | (Kabat) | |
| | 5283 | HC CDR3 | WGGDGFYAMDY |
| | | (Kabat) | |
| | 5284 | HC CDR1 | GFNIKDT |
| | | (Chothia) | |
| | 5285 | HC CDR2 | YPTNGY |
| | | (Chothia) | |
| | 5286 | HC CDR3 | WGGDGFYAMDY |
| | | (Chothia) | |
| | 5270 | VH | EVQLVESGGGLVQPGGSLRLSCAASGFNIKDTYIHWVRQAPGKGLEWVAR |
| | | | IYPTNGYTRYADSVKGRFTISADTSKNTAYLQMNSLRAEDTAVYYCSRWG |
| | | | GDGFYAMDYWGQGTLVTVSS |
| | 5269 | DNA VH | gaggttcagctggtggagtctggAggtggcctggtgcagccagggggctc |
| | | | actcAGAttgtcctgtgcagcttctggcttcaacattaaagacacctata |
| | | | tacactgggtgagacaggccccAggtaagggcctggaatgggttgcaagg |
| | | | atttatcctacCaatggttatactagatatgcTgatTCTgtcaagggcAG |
| | | | AttcactataTCTgcagacacatccaaaaacacagcctacctgcagatga |
| | | | acagcctgAGAgctgaggacactgcTgtctattattgttctagatgggga |
| | | | ggggaTggcttctatgctatggacTACtggggtcaaggaaccctggtcac |
| | | | AgtctcctcT |
| | 5272 | Heavy Chain | EVQLVESGGGLVQPGGSLRLSCAASGFNIKDTYIHWVRQAPGKGLEWVAR |
| | | (hIgG1) | IYPTNGYTRYADSVKGRFTISADTSKNTAYLQMNSLRAEDTAVYYCSRWG |
| | | | GDGFYAMDYWGQGTLVTVSSASTKGPSVFPLAPSSKSTSGGTAALGCLVK |
| | | | DYFPEPVTVSWNSGALTSGVHTFPAVLQSSGLYSLSSVVTVPSSSLGTQT |
| | | | YICNVNHKPSNTKVDKRVEPKSCDKTHTCPPCPAPELVGGPSVFLLPPKP |
| | | | KDTLMISRTPEVTCVVVDVSHEDPEVKFNWYVDGVEVHNAKTKPPEEQYN |
| | | | STLRVVSVLTVLHQDWLNGKEYKCKVSNKALPAPIEKTISKAKGQPREPQ |
| | | | VYTLPPSRDELTKNQVSLTCLVKGFYPSDIAVEWESNGQPENNYKTTPLV |
| | | | LDSDGSFFLYSKLTVDKSRWQQGNVFSCSVMHEALHNHYTQKSLSLSPGK |
| | 7589 | Heavy Chain | EVQLVESGGGLVQPGGSLRLSCAASGFNIKDTYIHWVRQAPGKGLEWVAR |
| | | (hIgG1) | IYPTNGYTRYADSVKGRFTISADTSKNTAYLQMNSLRAEDTAVYYCSRWG |
| | | | GDGFYAMDYWGQGTLVTVSSASTKGPSVFPLAPSSKSTSGGTAALGCLVK |
| | | | DYFPEPVTVSWNSGALTSGVHTFPAVLQSSGLYSLSSVVTVPSSSLGTQT |
| | | | YICNVNHKPSNTKVDKRVEPKSCDKTHTCPPCPAPELVGGPSVFLLPPKP |
| | | | KDTLMASRTPEVTCVVVDVSHEDPEVKFNWYVDGVEVHNAKTKPPEEQYN |
| | | | STLRVVSVLTVLAQDWLNGKEYKCKVSNKALPAPIEKTISKAKGQPREPQ |
| | | | VYTLPPSRDELTKNQVSLTCLVKGFYPSDIAVEWESNGQPENNYKTTPLV |
| | | | LDSDGSFFLYSKLTVDKSRWQQGNVFSCSVMHEALHNAYTQKSLSLSPGK |
| | 5271 | DNA Heavy | gaggttcagctggtggagtctggAggtggcctggtgcagccagggggctc |
| | | Chain | actcAGAttgtcctgtgcagcttctggcttcaacattaaagacacctata |
| | | (hIgG1) | tacactgggtgagacaggccccAggtaagggcctggaatgggttgcaagg |
| | | | atttatcctacCaatggttatactagatatgcTgatTCTgtcaagggcAG |
| | | | AttcactataTCTgcagacacatccaaaaacacagcctacctgcagatga |
| | | | acagcctgAGAgctgaggacactgcTgtctattattgttctagatgggga |
| | | | ggggaTggcttctatgctatggacTACtggggtcaaggaaccctggtcac |
| | | | AgtctcctcTgcCtcTaccaagggcccatcTgtcttccccctggcaccct |
| | | | cctccaagagcacctctgggggcacagcTgccctgggctgcctggtcaag |
| | | | gactacttcccIgaacctgtgacAgtctcCtggaactcaggAgccctgac |
| | | | cagTggAgtgcacaccttcccTgctgtcctacagtcctcaggactctact |
| | | | ccctcagcTCTgtggtgacAgtgccctccagcagcttgggcacccagacc |
| | | | tacatctgcaaIgtgaatcacaagcccagcaacaccaaggggacaagaG |
| | | | agttgagcccaaatcttgtgacaaaactcacacatgcccaccTtgcccag |
| | | | cacctgaactGGtggggggaccAtcagtcttcctcCtccccccaaaaccc |
| | | | aaggacaccctcatgatctccAGAacccctgaggtcacatgTgtggtggt |
| | | | ggaTgtgagccaTgaagaccctgaggtcaagttcaactggtaTgtggaTg |
| | | | gAgtggaggtgcataatgccaagacaaagccCcCTgaggagcagtacaac |
| | | | agcacTCTcAGAgtggtcTCTgtcctcacAgtcctgcaccaggactggct |
| | | | gaatggcaaggagtacaagtgcaaggtctccaacaaagccctcccagccc |
| | | | ccatTgagaaaaccatctccaaagccaaagggcagcccAGAgaaccacag |
| | | | gtgtacaccctgcccccatccAGAgaTgagCtgaccaagaaccaggtcag |
| | | | cctgacctgcctggtcaaaggcttctatcccTCTgacatIgcTgtggagt |
| | | | gggagagcaatgggcagccTgagaacaactacaagaccacAcctcTTgtg |
| | | | ctggactcTgaTggctccttcttcctctacagcaagctcacAgtggacaa |
| | | | gagcaggtggcagcaggggaaTgtcttctcatgcTCTgtgatgcatgagg |
| | | | ctctgcacaaccactacacCcagaagagcctctccctgtctccAggtaaa |
| | 5244 | DNA Heavy | gaggttcagctggtggagtctggAggtggcctggtgcagccagggggctc |
| | | Chain | actcAGAttgtcctgtgcagcttctggcttcaacattaaagacacctata |
| | | (hIgG1) | tacactgggtgagacaggccccAggtaagggcctggaatgggttgcaagg |
| | | | atttatcctacCaatggttatactagatatgcTgatTCTgtcaagggcAG |
| | | | AttcactataTCTgcagacacatccaaaaacacagcctacctgcagatga |
| | | | acagcctgAGAgctgaggacactgcTgtctattattgttctagatgggga |
| | | | ggggaTggcttctatgctatggacTACtggggtcaaggaaccctggtcac |
| | | | AgtctcctcTgcCtcTaccaagggcccatcTgtcttccccctggcaccct |
| | | | cctccaagagcacctctgggggcacagcTgccctgggctgcctggtcaag |
| | | | gactacttcccIgaacctgtgacAgtctcCtggaactcaggAgccctgac |
| | | | cagTggAgtgcacaccttcccTgctgtcctacagtcctcaggactctact |
| | | | ccctcagcTCTgtggtgacAgtgccctccagcagcttgggcacccagacc |
| | | | tacatctgcaaTgtgaatcacaagcccagcaacaccaaggtggacaagaG |
| | | | agttgagcccaaatcttgtgacaaaactcacacatgcccaccTtgcccag |
| | | | cacctgaactGGtggggggaccAtcagtcttcctcCtccccccaaaaccc |
| | | | aaggacaccctcatgatctccAGAacccctgaggtcacatgTgtggtggt |
| | | | ggaTgtgagccaTgaagaccctgaggtcaagttcaactggtaTgtggaTg |
| | | | gAgtggaggtgcataatgccaagacaaagccCcCTgaggagcagtacaac |
| | | | agcacTCTcAGAgtggtcTCTgtcctcacAgtcctgcaccaggactggct |
| | | | gaatggcaaggagtacaagtgcaaggtctccaacaaagccctcccagccc |
| | | | ccatTgagaaaaccatctccaaagccaaagggcagcccAGAgaaccacag |
| | | | gtgtacaccctgcccccatccAGAgaTgagCtgaccaagaaccaggtcag |
| | | | cctgacctgcctggtcaaaggcttctatcccTCTgacatTgcTgtggagt |
| | | | gggagagcaatgggcagccTgagaacaactacaagaccacAcctcTTgtg |
| | | | ctggactcTgaTggctccttcttcctctacagcaagctcacAgtggacaa |
| | | | gagcagAtggcagcaggggaaTgtcttctcatgcTCTgtgatgcatgagg |
| | | | ctctgcacaaccactacacCcagaagagcctctccctgtctccAggtaaa |
| | 7590 | DNA Heavy | gaggttcagctggtggagtctggAggtggcctggtgcagccagggggctc |
| | | Chain | actcAGAttgtcctgtgcagcttctggcttcaacattaaagacacctata |
| | | (hIgG1) | tacactgggtgagacaggccccAggtaagggcctggaatgggttgcaagg |
| | | | atttatcctacCaatggttatactagatatgcTgatTCTgtcaagggcAG |
| | | | AttcactataTCTgcagacacatccaaaaacacagcctacctgcagatga |
| | | | acagcctgAGAgctgaggacactgcTgtctattattgttctagatgggga |
| | | | ggggaTggcttctatgctatggacTACtggggtcaaggaaccctggtcac |
| | | | AgtctcctcTgcCtcTaccaagggcccatcTgtcttccccctggcaccct |
| | | | cctccaagagcacctctgggggcacagcTgccctgggctgcctggtcaag |
| | | | gactacttcccTgaacctgtgacAgtctcCtggaactcaggAgccctgac |
| | | | cagTggAgtgcacaccttcccTgctgtcctacagtcctcaggactctact |
| | | | ccctcagcTCTgtggtgacAgtgccctccagcagcttgggcacccagacc |
| | | | tacatctgcaaTgtgaatcacaagcccagcaacaccaaggtggacaagaG |
| | | | agttgagcccaaatcttgtgacaaaactcacacatgcccaccTtgcccag |
| | | | cacctgaactGGtggggggaccAtcagtcttcctcCtccccccaaaaccc |
| | | | aaggacaccctcatgGCAtccAGAacccctgaggtcacatgTgtggtggt |
| | | | ggaTgtgagccaTgaagaccctgaggtcaagttcaactggtaTgtggaTg |
| | | | gAgtggaggtgcataatgccaagacaaagccCcCTgaggagcagtacaac |
| | | | agcacTCTcAGAgtggtcTCTgtcctcacAgtcctgGCCcaggactggct |
| | | | gaatggcaaggagtacaagtgcaaggtctccaacaaagccctcccagccc |
| | | | ccatTgagaaaaccatctccaaagccaaagggcagcccAGAgaaccacag |
| | | | gtgtacaccctgcccccatccAGAgaTgagCtgaccaagaaccaggtcag |
| | | | cctgacctgcctggtcaaaggcttctatcccTCTgacatTgcTgtggagt |
| | | | gggagagcaatgggcagccTgagaacaactacaagaccacAcctcTTgtg |
| | | | ctggactcTgaTggctccttcttcctctacagcaagctcacAgtggacaa |
| | | | gagcagAtggcagcaggggaaTgtcttctcatgcTCTgtgatgcatgagg |
| | | | ctctgcacaacGCTtacacCcagaagagcctctccctgtctccAggtaaa |
| | 5287 | LC CDR1 | RASQDVNTAVA |
| | | (Kabat) | |
| | 5288 | LC CDR2 | SASFLYS |
| | | (Kabat) | |
| | 5289 | LC CDR3 | QQHYTTPPT |
| | | (Kabat) | |
| | 5287 | LC CDR1 | RASQDVNTAVA |
| | | (Chothia) | |
| | 5291 | LC CDR2 | SASFLYS |
| | | (Chothia) | |
| | 5292 | LC CDR3 | QQHYTTPPT |
| | | (Chothia) | |
| | 5274 | VL | DIQMTQSPSSLSASVGDRVTITCRASQDVNTAVAWYQQKPGKAPKLLIYS |
| | | | ASFLYSGVPSRFSGSRSGTDFTLTISSLQPEDFATYYCQQHYTTPPTFGQ |
| | | | GTKVEIK |
| | 5273 | DNA VL | gatatccagatgacccagtccccTagctccctgtcTgcctctgtgggAga |
| | | | tagggtcaccatcacctgcAGAgccagtcaggatgtgaatactgctgtag |
| | | | cctggtatcaacagaaaccaggaaaagctccTaaactactgatttactcT |
| | | | gcatccttcctcTACtctggagtcccttctAGGttctctggatccagatc |
| | | | tgggacTgatttcactctgaccatcagcagtctgcagccAgaagacttTg |
| | | | caacttattactgtcagcaacattatactactcctcccacIttIggacag |
| | | | ggtaccaaggtggagatcaaa |
| | 5245 | DNA VL | gatatccagatgacccagtccccTagctccctgtcTgcctctgtgggAga |
| | | | tagggtcaccatcacctgTAGAgccagtcaggatgtgaatactgctgtag |
| | | | cctggtatcaacagaaaccaggaaaagctccTaaactactgatttactcT |
| | | | gcatccttcctcTACtctggagtcccttctAGGttctctggatccagatc |
| | | | tgggacTgatttcactctgaccatcagcagtctgcagccAgaagacttTg |
| | | | caacttattactgtcagcaacattatactactcctcccacTttTggacag |
| | | | ggtaccaaggtggagatcaaa |
| | 5276 | Light Chain | DIQMTQSPSSLSASVGDRVTITCRASQDVNTAVAWYQQKPGKAPKLLIYS |
| | | (hIgG1) | ASFLYSGVPSRFSGSRSGTDFTLTISSLQPEDFATYYCQQHYTTPPTFGQ |
| | | | GTKVEIKRTVAAPSVFIFPPSDEQLKSGTASVVCLLNNFYPREAKVQWKV |
| | | | DNALQSGNSQESVTEQDSKDSTYSLSSTLTLSKADYEKHKVYACEVTHQG |
| | | | LSSPVTKSFNRGEC |
| | 5246 | DNA Light | gatatccagatgacccagtccccTagctccctgtcTgcctctgtgggAga |
| | | Chain | tagggtcaccatcacctgTAGAgccagtcaggatgtgaatactgctgtag |
| | | (hIgG1) | cctggtatcaacagaaaccaggaaaagctccTaaactactgatttactcT |
| | | | gcatccttcctcTACtctggagtcccttctAGGttctctggatccagatc |
| | | | tgggacTgatttcactctgaccatcagcagtctgcagccAgaagacttTg |
| | | | caacttattactgtcagcaacattatactactcctcccacTttTggacag |
| | | | ggtaccaaggtggagatcaaaAGAactgtggctgcaccatctgtcttcat |
| | | | cttcccAccatctgatgagcagttgaaatctggaactgcctctgttgtgt |
| | | | gcctgctgaataacttctatcccagagaggccaaagtacagtggaaggtg |
| | | | gataaTgccctccaatcAggtaactcccaggagagtgtcacagagcagga |
| | | | cagcaaggacagcacctacagcctcagcagcaccctgacTctgagcaaag |
| | | | cagactaTgagaaacacaaagtctaIgcctgTgaagtcacccatcagggc |
| | | | ctgagctcTccTgtcacaaagagcttcaacaggggagagtgt |
| | 5275 | DNA Light | gatatccagatgacccagtccccTagctccctgtcTgcctctgtgggAga |
| | | Chain | tagggtcaccatcacctgcAGAgccagtcaggatgtgaatactgctgtag |
| | | (hIgG1) | cctggtatcaacagaaaccaggaaaagctccTaaactactgatttactcT |
| | | | gcatccttcctcTACtctggagtcccttctAGGttctctggatccagatc |
| | | | tgggacTgatttcactctgaccatcagcagtctgcagccAgaagacttTg |
| | | | caacttattactgtcagcaacattatactactcctcccacTttIggacag |
| | | | ggtaccaaggtggagatcaaaAGAactgtggctgcaccatctgtcttcat |
| | | | cttcccAccatctgatgagcagttgaaatctggaactgcctctgttgtgt |
| | | | gcctgctgaataacttctatcccagagaggccaaagtacagtggaaggtg |
| | | | gataaTgccctccaatcAggtaactcccaggagagtgtcacagagcagga |
| | | | cagcaaggacagcacctacagcctcagcagcaccctgacTctgagcaaag |
| | | | cagactaTgagaaacacaaagtctaTgcctgTgaagtcacccatcagggc |
| | | | ctgagctcTccTgtcacaaagagcttcaacaggggagagtgt |
| Ab-HER- | 5323 | HC CDR1 | DTYIH |
| 77 | | (Kabat) | |
| | 5324 | HC CDR2 | RIYPINGYTRYADSVKG |
| | | (Kabat) | |
| | 5325 | HC CDR3 | WGGDGFYAMDY |
| | | (Kabat) | |
| | 5326 | HC CDR1 | GFNIKDT |
| | | (Chothia) | |
| | 5327 | HC CDR2 | YPTNGY |
| | | (Chothia) | |
| | 5325 | HC CDR3 | WGGDGFYAMDY |
| | | (Chothia) | |
| | 5329 | VH | EVQLVESGGGLVQPGGSLRLSCAASGFNIKDTYIHWVRQAPGKGLEWVAR |
| | | | IYPTNGYTRYADSVKGRFTISADTSKNTAYLQMNSLRAEDTAVYYCSRWG |
| | | | GDGFYAMDYWGQGTLVTVSS |
| | 5330 | DNA VH | GAAGTGCAGCTGGTGGAAAGCGGCGGAGGACTGGTGCAGCCTGGCGGATC |
| | | | TCTGAGACTGAGCTGTGCCGCCAGCGGCTTCAACATCAAGGACACCTACA |
| | | | TCCACTGGGTGCGCCAGGCCCCTGGCAAGGGACTGGAATGGGTGGCCAGA |
| | | | ATCTACCCCACCAACGGCTACACCAGATACGCCGACAGCGTGAAGGGCCG |
| | | | GTTCACCATCAGCGCCGACACCAGCAAGAACACCGCCTACCTGCAGATGA |
| | | | ACAGCCTGCGGGCCGAGGACACCGCCGTGTACTACTGTAGTAGATGGGGA |
| | | | GGCGACGGCTTCTACGCCATGGACTATTGGGGCCAGGGCACCCTCGTGAC |
| | | | AGTGTCTAGT |
| | 5331 | Heavy Chain | EVQLVESGGGLVQPGGSLRLSCAASGFNIKDTYIHWVRQAPGKGLEWVAR |
| | | (hIgG1) | IYPTNGYTRYADSVKGRFTISADTSKNTAYLQMNSLRAEDTAVYYCSRWG |
| | | | GDGFYAMDYWGQGTLVTVSSASTKGPSVFPLAPSSKSTSGGTAALGCLVK |
| | | | DYFPEPVTVSWNSGALTSGVHTFPAVLQSSGLYSLSSVVTVPSSSLGTQT |
| | | | YICNVNHKPSNTKVDKKVEPKSCDKTHTCPPCPAPELLGGPSVFLFPPKP |
| | | | KDTLMISRTPEVTCVVVDVSHEDPEVKFNWYVDGVEVHNAKTKPREEQYN |
| | | | STYRVVSVLTVLHQDWLNGKEYKCKVSNKALPAPIEKTISKAKGQPREPQ |
| | | | VYTLPPSRDELTKNQVSLTCLVKGFYPSDIAVEWESNGQPENNYKTTPPV |
| | | | LDSDGSFFLYSKLTVDKSRWQQGNVFSCSVMHEALHNHYTQKSLSLSPGK |
| | 5332 | DNA Heavy | GAAGTGCAGCTGGTGGAAAGCGGCGGAGGACTGGTGCAGCCTGGCGGATC |
| | | Chain | TCTGAGACTGAGCTGTGCCGCCAGCGGCTTCAACATCAAGGACACCIACA |
| | | (hIgG1) | TCCACTGGGTGCGCCAGGCCCCTGGCAAGGGACTGGAATGGGTGGCCAGA |
| | | | ATCTACCCCACCAACGGCTACACCAGATACGCCGACAGCGTGAAGGGCCG |
| | | | GTTCACCATCAGCGCCGACACCAGCAAGAACACCGCCTACCTGCAGATGA |
| | | | ACAGCCTGCGGGCCGAGGACACCGCCGTGTACTACTGTAGTAGATGGGGA |
| | | | GGCGACGGCTTCTACGCCATGGACTATTGGGGCCAGGGCACCCTCGTGAC |
| | | | AGTGTCTAGTGCGTCGACCAAGGGGCCCTCGGTCTTCCCCCTGGCACCCT |
| | | | CCTCCAAGAGCACCTCTGGGGGCACAGCGGCCCTGGGCTGCCTGGTCAAG |
| | | | GACTACTTCCCCGAACCGGTGACGGTGTCGTGGAACTCAGGCGCCCTGAC |
| | | | CAGCGGCGTGCACACCTTCCCGGCTGTCCTACAGTCCTCAGGACTCTACT |
| | | | CCCTCAGCAGCGTGGTGACCGTGCCCTCCAGCAGCTTGGGCACCCAGACC |
| | | | TACATCTGCAACGTGAATCACAAGCCCAGCAACACCAAGGTGGACAAGAA |
| | | | AGTTGAGCCCAAATCTTGTGACAAAACTCACACATGCCCACCGTGCCCAG |
| | | | CACCTGAACTCCTGGGGGGACCGTCAGTCTTCCTCTTCCCCCCAAAACCC |
| | | | AAGGACACCCTCATGATCTCCCGGACCCCTGAGGTCACATGCGTGGTGGT |
| | | | GGACGTGAGCCACGAAGACCCTGAGGTCAAGTTCAACTGGTACGTGGACG |
| | | | GCGTGGAGGTGCATAATGCCAAGACAAAGCCGCGGGAGGAGCAGTACAAC |
| | | | AGCACGTACCGTGTGGTCAGCGTCCTCACCGTCCTGCACCAGGACTGGCT |
| | | | GAATGGCAAGGAGTACAAGTGCAAGGTCTCCAACAAAGCCCTCCCAGCCC |
| | | | CCATCGAGAAAACCATCTCCAAAGCCAAAGGGCAGCCCCGAGAACCACAG |
| | | | GTGTACACCCTGCCCCCATCCCGGGATGAGCTGACCAAGAACCAGGTCAG |
| | | | CCTGACCTGCCTGGTCAAAGGCTTCTATCCCAGCGACATCGCCGTGGAGT |
| | | | GGGAGAGCAATGGGCAGCCGGAGAACAACTACAAGACCACGCCTCCCGTG |
| | | | CTGGACTCCGACGGCTCCTTCTTCCTCTACAGCAAGCTCACCGTGGACAA |
| | | | GAGCAGGTGGCAGCAGGGGAACGTCTTCTCATGCTCCGTGATGCATGAGG |
| | | | CTCTGCACAACCACTACACGCAGAAGAGCCTCTCCCTGTCTCCCGGCAAG |
| | 5333 | LC CDR1 | RASQDVNTAVA |
| | | (Kabat) | |
| | 5334 | LC CDR2 | SASFLYS |
| | | (Kabat) | |
| | 5335 | LC CDR3 | QQHYTTPPT |
| | | (Kabat) | |
| | 5336 | LC CDR1 | RASQDVNTAVA |
| | | (Chothia) | |
| | 5337 | LC CDR2 | SASFLYS |
| | | (Chothia) | |
| | 5338 | LC CDR3 | QQHYTTPPT |
| | | (Chothia) | |
| | 5339 | VL | DIQMTQSPSSLSASVGDRVTITCRASQDVNTAVAWYQQKPGKAPKLLIYS |
| | | | ASFLYSGVPSRFSGSRSGTDFTLTISSLQPEDFATYYCQQHYTTPPTFGQ |
| | | | GTKVEIK |
| | 5340 | DNA VL | GATATCCAGATGACCCAGAGCCCCAGCAGCCTGTCTGCCAGCGTGGGCGA |
| | | | CAGAGTGACCATCACCTGTAGAGCCAGCCAGGACGTGAACACCGCCGTGG |
| | | | CCTGGTATCAGCAGAAGCCTGGCAAGGCCCCCAAGCTGCTGATCTACAGC |
| | | | GCCAGCTTCCTGTACAGCGGCGTGCCCAGCAGATTCAGCGGCAGCAGATC |
| | | | CGGCACCGACTTCACCCTGACCATCAGCTCCCTGCAGCCCGAGGACTTCG |
| | | | CCACCTACTACTGCCAGCAGCACTACACCACCCCCCCCACATTTGGCCAG |
| | | | GGCACCAAGGTGGAAATCAAG |
| | 5341 | Light Chain | DIQMTQSPSSLSASVGDRVTITCRASQDVNTAVAWYQQKPGKAPKLLIYS |
| | | (hIgG1) | ASFLYSGVPSRFSGSRSGTDFTLTISSLQPEDFATYYCQQHYTTPPTFGQ |
| | | | GTKVEIKRTVAAPSVFIFPPSDEQLKSGTASVVCLLNNFYPREAKVQWKV |
| | | | DNALQSGNSQESVTEQDSKDSTYSLSSTLTLSKADYEKHKVYACEVTHQG |
| | | | LSSPVTKSFNRGEC |
| | 5342 | DNA Light | GATATCCAGATGACCCAGAGCCCCAGCAGCCTGTCTGCCAGCGTGGGCGA |
| | | Chain | CAGAGTGACCATCACCTGTAGAGCCAGCCAGGACGTGAACACCGCCGTGG |
| | | (hIgG1) | CCTGGTATCAGCAGAAGCCTGGCAAGGCCCCCAAGCTGCTGATCTACAGC |
| | | | GCCAGCTTCCTGTACAGCGGCGTGCCCAGCAGATTCAGCGGCAGCAGATC |
| | | | CGGCACCGACTTCACCCTGACCATCAGCTCCCTGCAGCCCGAGGACTTCG |
| | | | CCACCTACTACTGCCAGCAGCACTACACCACCCCCCCCACATTTGGCCAG |
| | | | GGCACCAAGGTGGAAATCAAGCGTACGGTGGCTGCACCATCTGTCTTCAT |
| | | | CTTCCCGCCATCTGATGAGCAGTTGAAATCTGGAACTGCCTCTGTTGTGT |
| | | | GCCTGCTGAATAACTTCTACCCCAGAGAAGCCAAAGTGCAGTGGAAGGTG |
| | | | GACAACGCCCTGCAGAGCGGAAACAGCCAGGAAAGCGTGACAGAGCAGGA |
| | | | TTCCAAGGATTCCACATACAGCCTGAGCAGCACACTGACACTGTCCAAGG |
| | | | CCGACTACGAGAAGCACAAGGTGTACGCCTGCGAAGTGACACACCAGGGA |
| | | | CTGTCCTCCCCTGTGACAAAGAGCTTCAACAGAGGAGAATGC |
| Ab-HER- | 5311 | HC CDR1 | GYFIN |
| 78 | | (Kabat) | |
| | 5312 | HC CDR2 | HISSSYATSTYNQKFQ |
| | | (Kabat) | |
| | 5313 | HC CDR3 | YCVRSGNY |
| | | (Kabat) | |
| | 5314 | HC CDR1 | GYSFTGY |
| | | (Chothia) | |
| | 5315 | HC CDR2 | SSSYA |
| | | (Chothia | |
| | 5316 | HC CDR3 | YCVRSGNY |
| | | (Chothia) | |
| | 5358 | HC CDR1 | GYSFTGYFIN |
| | 5359 | HC CDR2 | HISSSYATSTYNQKFQG |
| | 5360 | HC CDR3 | SGNYEEYAMDY |
| | 5262 | VH | QVQLVQSGAEVKKPGASVKVSCKASGYSFTGYFINWVREAPGQGLEWMGH |
| | | | ISSSYATSTYNQKFQGRVTFTVDTSSSTAYMELSSLRSEDTAVYYCVRSG |
| | | | NYEEYAMDYWGQGTLVTVSS |
| | 5261 | DNA VH | CAAgttcagctggtgCAGtctggTGCAGAAGTTAAGAAGccagggGCAtc |
| | | | aGTAAAGGTGTCCtgCAAGgcttctggcTACTCTTTCACTGGGTATTTCa |
| | | | taAATtgggtgAGAGAGgccccCGGCCAGggcctggaatggATGGGCCAT |
| | | | attTCCTCCTCTTATGCAACTTCTACAtatAACCAGAAGTTTCAGggcAG |
| | | | AGTCactTTCACTGTGgacacatccAGCTCTacagcctacATGGAGCTGT |
| | | | CAagcctgAGATCTgaggacactgcagtctattattgtGTGagaAGTgga |
| | | | AACTAtGAAGAGTATgctatggacTACtggggtcaaggaaccctggtcac |
| | | | AgtctcctcA |
| | 5376 | Heavy Chain | QVQLVQSGAEVKKPGASVKVSCKASGYSFTGYFINWVREAPGQGLEWMGH |
| | | (hIgG1) | ISSSYATSTYNQKFQGRVTFTVDTSSSTAYMELSSLRSEDTAVYYCVRSG |
| | | | NYEEYAMDYWGQGTLVTVSSASTKGPSVFPLAPSSKSTSGGTAALGCLVK |
| | | | DYFPEPVTVSWNSGALTSGVHTFPAVLQSSGLYSLSSVVTVPSSSLGTQT |
| | | | YICNVNHKPSNTKVDKRVEPKSCDKTHTCPPCPAPELVGGPSVFLLPPKP |
| | | | KDTLMISRTPEVTCVVVDVSHEDPEVKFNWYVDGVEVHNAKTKPPEEQYN |
| | | | STLRVVSVLTVLHQDWLNGKEYKCKVSNKALPAPIEKTISKAKGQPREPQ |
| | | | VYTLPPSRDELTKNQVSLTCLVKGFYPSDIAVEWESNGQPENNYKTTPLV |
| | | | LDSDGSFFLYSKLTVDKSRWQQGNVFSCSVMHEALHNHYTQKSLSLSPGK |
| | 5377 | DNA Heavy | CAAgttcagctggtgCAGtctggTGCAGAAGTTAAGAAGccagggGCAtc |
| | | Chain | aGTAAAGGTGTCCtgCAAGgcttctggcTACTCTTTCACTGGGTATTTCa |
| | | (hIgG1) | taAATtgggtgAGAGAGgccccCGGCCAGggcctggaatggATGGGCCAT |
| | | | attTCCTCCTCTTATGCAACTTCTACAtatAACCAGAAGTTTCAGggcAG |
| | | | AGTCactTTCACTGTGgacacatccAGCTCTacagcctacATGGAGCTGT |
| | | | CAagcctgAGATCTgaggacactgcagtctattattgtGTGagaAGTgga |
| | | | AACTAtGAAGAGTATgctatggacTACtggggtcaaggaaccctggtcac |
| | | | AgtctcctcAgcCtcTaccaagggcccatcTgtcttccccctggcaccct |
| | | | cctccaagagcacctctgggggcacagcTgccctgggctgcctggtcaag |
| | | | gactacttcccIgaacctgtgacAgtctcCtggaactcaggAgccctgac |
| | | | cagTggAgtgcacaccttcccTgctgtcctacagtcctcaggactctact |
| | | | ccctcagcTCTgtggtgacAgtgccctccagcagcttgggcacccagacc |
| | | | tacatctgcaaTgtgaatcacaagcccagcaacaccaaggtggacaagaG |
| | | | agttgagcccaaatcttgtgacaaaactcacacatgcccaccTtgcccag |
| | | | cacctgaactGGtggggggaccAtcagtcttcctcCtccccccaaaaccc |
| | | | aaggacaccctcatgatctccAGAacccctgaggtcacatgTgtggtggt |
| | | | ggaTgtgagccaTgaagaccctgaggtcaagttcaactggtaTgtggaTg |
| | | | gAgtggaggtgcataatgccaagacaaagccCcCTgaggagcagtacaac |
| | | | agcacTCTcAGAgtggtcTCTgtcctcacAgtcctgcaccaggactggct |
| | | | gaatggcaaggagtacaagtgcaaggtctccaacaaagccctcccagccc |
| | | | ccatTgagaaaaccatctccaaagccaaagggcagcccAGAgaaccacag |
| | | | gtgtacaccctgcccccatccAGAgaTgagCtgaccaagaaccaggtcag |
| | | | cctgacctgcctggtcaaaggcttctatcccTCTgacatTgcTgtggagt |
| | | | gggagagcaatgggcagccTgagaacaactacaagaccacAcctcTTgtg |
| | | | ctggactcTgaIggctccttcttcctctacagcaagctcacAgtggacaa |
| | | | gagcaggtggcagcaggggaaTgtcttctcatgcTCTgtgatgcatgagg |
| | | | ctctgcacaaccactacacCcagaagagcctctccctgtctccAggtaaa |
| | 5355 | LC CDR1 | RSSQTLLYSNNQKNYLA |
| | 5356 | LC CDR2 | WAFTRKS |
| | 5357 | LC CDR3 | QQYSNYPWT |
| | 5354 | VL | DIVLTQSPDSLAVSLGERATINCRSSQTLLYSNNQKNYLAWYQKKPGQPP |
| | | | KLLISWAFTRKSGVPDRFSGSGSGTDFTLTISSLQAEDVAVYYCQQYSNY |
| | | | PWTFGQGTKVEIK |
| | 5353 | DNA VL | gatatTGTACTGacccagtccccTGACtccctgGCTGTGtctCTGggGGA |
| | | | AaggGCAaccatcAACtgcAGGAGTagtcagACCCTTCTGTACTCTAATA |
| | | | ACCAGAAAAACTACCTGgcctggtatcaaAAAaaaccaggaCAGCCTccT |
| | | | aaactactgattAGTTGGgcaTTCACTAGGAAGtctggagtccctGACAG |
| | | | GttctctggatcTGGGtcTggAacAgatttcacActgaccatcagcagtc |
| | | | tgcagGCTgaagaTGTTgcaGTCtaCtactgtcagcaaTACTCAAACTAC |
| | | | cctTGGacTttTggacagggGaccaaAgtggagatcaaa |
| | 5268 | Light Chain | DIVLTQSPDSLAVSLGERATINCRSSQTLLYSNNQKNYLAWYQKKPGQPP |
| | | (hIgG1) | KLLISWAFTRKSGVPDRFSGSGSGTDFTLTISSLQAEDVAVYYCQQYSNY |
| | | | PWTFGQGTKVEIKRTVAAPSVFIFPPSDEQLKSGTASVKCLLNNFYPREA |
| | | | KVQWKVDNALQSGNSQESVTEQDSKDSTYSLSSTLTLSKADYEKHKVYAC |
| | | | EVTHQGLSSPVTKSENRGEC |
| | 5267 | DNA Light | gatatTGTACTGacccagtccccTGACtccctgGCTGTGtctCTGggGGA |
| | | Chain | AaggGCAaccatcAACtgcAGGAGTagtcagACCCTTCTGTACTCTAATA |
| | | (hIgG1) | ACCAGAAAAACTACCTGgcctggtatcaaAAAaaaccaggaCAGCCTccT |
| | | | aaactactgattAGTTGGgcaTTCACTAGGAAGtctggagtccctGACAG |
| | | | GttctctggatcTGGGtcTggAacAgatttcacActgaccatcagcagtc |
| | | | tgcagGCTgaagaTGTTgcaGTCtaCtactgtcagcaaTACTCAAACTAC |
| | | | cctTGGacTttIggacagggGaccaaAgtggagatcaaaAGGactgtCgc |
| | | | tgcaccatctgtcttcatcttcccAccatctgatgagcagttgaaatctg |
| | | | gaactgcctctgttAAGtgcctgctgaataacttctatcccagagaggcc |
| | | | aaagtacagtggaaggtggataaTgccctccaaAGTggtaactcccagga |
| | | | gagtgtcacagagcaggacagcaaggacagcacctacagcctcagcagca |
| | | | ccctgacCctgagcaaagcagactaTgagaaacacaaagtctaTgcctgT |
| | | | gaagtcacccatcagggcctgagcAGCccAgtcacaaagagcttcaacag |
| | | | gggagagtgt |
| | 5037 | HC CDR1 | DTYIH |
| | | (Kabat) | |
| | 5038 | HC CDR2 | RIYPTNGYTRYADSVKG |
| | | (Kabat) | |
| | 5039 | HC CDR3 | WGGDGFYAMDY |
| | | (Kabat) | |
| | 5040 | HC CDR1 | GFNIKDT |
| | | (Chothia) | |
| | 5041 | HC CDR2 | YPTNGY |
| | | (Chothia) | |
| | 5042 | HC CDR3 | WGGDGFYAMDY |
| | | (Chothia) | |
| | 5361 | HC CDR1 | GFNIKDTYIH |
| | 5362 | HC CDR2 | RIYPTNGYTRYADSVKG |
| | 5363 | HC CDR3 | WGGDGFYAMDY |
| | 5290 | VH | EVQLVESGGGLVQPGGSLRLSCAASGFNIKDTYIHWVRQAPGKGLEWVAR |
| | | | IYPTNGYTRYADSVKGRFTISADTSKNTAYLQMNSLRAEDTAVYYCSRWG |
| | | | GDGFYAMDYWGQGTLVTVSS |
| | 6552 | DNA VH | gaggttcagctggtggagtctggTggtggcctGgtgcagccagggggctc |
| | | | actcAGAttgtcctgtgcagcttctggcttcaacattaaagacacctata |
| | | | tacactgggtgAGAcaggccccTggAaagggcctggaatgggttgcaagg |
| | | | atttatcctacTaatggttatactagatatgcAgatagTgtcaagggcAG |
| | | | AttcactataagTgcagacacatccaaaaacacagcctacctgcagatga |
| | | | acagcctgAGAgctgaggacactgcAgtctattattgttctagatgggga |
| | | | ggggaTggcttctatgctatggacTACtggggtcaaggaaccctggtcac |
| | | | AgtctcctcT |
| | 5317 | LC CDR1 | RASQDVNTAVA |
| | | (Kabat) | |
| | 5318 | LC CDR2 | SASFLYS |
| | | (Kabat) | |
| | 5319 | LC CDR3 | QQHYTTPPT |
| | | (Kabat) | |
| | 5320 | LC CDR1 | RASQDVNTAVA |
| | | (Chothia) | |
| | 5321 | LC CDR2 | SASFLYS |
| | | (Chothia) | |
| | 5322 | LC CDR3 | QQHYTTPPT |
| | | (Chothia) | |
| | 5266 | VL | DIQMTQSPSSLSASVGDRVTITCRASQDVNTAVAWYQQKPGKAPKLLIYS |
| | | | ASFLYSGVPSRFSGSRSGTDFTLTISSLQPEDFATYYCQQHYTTPPTFGQ |
| | | | GTKVEIK |
| | 5265 | DNA VL | gatatccagatgacccagtccccAagctccctgtcTgcctctgtgggGga |
| | | | tagggtcaccatcacctgcAGAgccagtcaggatgtgaatactgctgtag |
| | | | cctggtatcaacagaaaccaggaaaagctccCaaactactgatttactcT |
| | | | gcatccttcctcTACtctggagtcccttctAGAttctctggatccagatc |
| | | | tggCacTgaCttcactctgaccatcagTagtctgcagccTgaagacttTg |
| | | | caacttattactgtcaAcaacattatactactcctcccacCttIggacag |
| | | | ggtaccaaggtggagatcaaa |
| | 5351 | scFv | EVQLVESGGGLVQPGGSLRLSCAASGFNIKDTYIHWVRQAPGKGLEWVAR |
| | | | IYPTNGYTRYADSVKGRFTISADTSKNTAYLQMNSLRAEDTAVYYCSRWG |
| | | | GDGFYAMDYWGQGTLVTVSSGGGGSGGGGSGGGGSDIQMTQSPSSLSASV |
| | | | GDRVTITCRASQDVNTAVAWYQQKPGKAPKLLIYSASFLYSGVPSRFSGS |
| | | | RSGTDFTLTISSLQPEDFATYYCQQHYTTPPTFGQGTKVEIK |
| | 5364 | scFv DNA | gaggttcagctggtggagtctggTggtggcctGgtgcagccagggggctc |
| | | | actcAGAttgtcctgtgcagcttctggcttcaacattaaagacacctata |
| | | | tacactgggtgAGAcaggccccTggAaagggcctggaatgggttgcaagg |
| | | | atttatcctacTaatggttatactagatatgcAgatagTgtcaagggcAG |
| | | | AttcactataagTgcagacacatccaaaaacacagcctacctgcagatga |
| | | | acagcctgAGAgctgaggacactgcAgtctattattgttctagatgggga |
| | | | ggggaTggcttctatgctatggacTACtggggtcaaggaaccctggtcac |
| | | | AgtctcctcTggtggtggtggatcTggaggaggaggaAGTggaggtggag |
| | | | gtTCTgatatccagatgacccagtccccAagctccctgtcTgcctctgtg |
| | | | ggGgatagggtcaccatcacctgcAGAgccagtcaggatgtgaatactgc |
| | | | tgtagcctggtatcaacagaaaccaggaaaagctccCaaactactgattt |
| | | | actcTgcatccttcctcTACtctggagtcccttctAGAttctctggatcc |
| | | | agatctggCacIgaCttcactctgaccatcagTagtctgcagccTgaaga |
| | | | cttTgcaacttattactgtcaAcaacattatactactcctcccacCttTg |
| | | | gacagggtaccaaggtggagatcaaa |
| | 5365 | Light Chain | EVQLVESGGGLVQPGGSLRLSCAASGFNIKDTYIHWVRQAPGKGLEWVAR |
| | | | IYPTNGYTRYADSVKGRFTISADTSKNTAYLQMNSLRAEDTAVYYCSRWG |
| | | | GDGFYAMDYWGQGTLVTVSSGGGGSGGGGSGGGGSDIQMTQSPSSLSASV |
| | | | GDRVTITCRASQDVNTAVAWYQQKPGKAPKLLIYSASFLYSGVPSRFSGS |
| | | | RSGTDFTLTISSLQPEDFATYYCQQHYTTPPTFGQGTKVEIKGSDIVLTQ |
| | | | SPDSLAVSLGERATINCRSSQTLLYSNNQKNYLAWYQKKPGQPPKLLISW |
| | | | AFTRKSGVPDRFSGSGSGTDFTLTISSLQAEDVAVYYCQQYSNYPWTFGQ |
| | | | GTKVEIKRTVAAPSVFIFPPSDEQLKSGTASVKCLLNNFYPREAKVQWKV |
| | | | DNALQSGNSQESVTEQDSKDSTYSLSSTLTLSKADYEKHKVYACEVTHQG |
| | | | LSSPVTKSENRGEC |
| | 5366 | DNA Light | gaggttcagctggtggagtctggTggtggcctGgtgcagccagggggctc |
| | | Chain | actcAGAttgtcctgtgcagcttctggcttcaacattaaagacacctata |
| | | | tacactgggtgAGAcaggccccTggAaagggcctggaatgggttgcaagg |
| | | | atttatcctacTaatggttatactagatatgcAgatagTgtcaagggcAG |
| | | | AttcactataagTgcagacacatccaaaaacacagcctacctgcagatga |
| | | | acagcctgAGAgctgaggacactgcAgtctattattgttctagatgggga |
| | | | ggggaTggcttctatgctatggacTACtggggtcaaggaaccctggtcac |
| | | | AgtctcctcTggtggtggtggatcTggaggaggaggaAGTggaggtggag |
| | | | gtTCTgatatccagatgacccagtccccAagctccctgtcTgcctctgtg |
| | | | ggGgatagggtcaccatcacctgcAGAgccagtcaggatgtgaatactgc |
| | | | tgtagcctggtatcaacagaaaccaggaaaagctccCaaactactgattt |
| | | | actcTgcatccttcctcTACtctggagtcccttctAGAttctctggatcc |
| | | | agatctggCacTgaCttcactctgaccatcagTagtctgcagccTgaaga |
| | | | cttTgcaacttattactgtcaAcaacattatactactcctcccacCttTg |
| | | | gacagggtaccaaggtggagatcaaaGGCTCTgatatTGTACTGacccag |
| | | | tccccTGACtccctgGCTGTGtctCTGggGGAAaggGCAaccatcAACtg |
| | | | CAGGAGTagtcagACCCTTCTGTACTCTAATAACCAGAAAAACTACCTGg |
| | | | cctggtatcaaAAAaaaccaggaCAGCCTccTaaactactgattAGITGG |
| | | | gcaTTCACTAGGAAGtctggagtccctGACAGGttctctggatcTGGGtc |
| | | | TggAacAgatttcacActgaccatcagcagtctgcagGCTgaagaTGTTg |
| | | | caGTCtaCtactgtcagcaaTACTCAAACTACcctTGGacTttIggacag |
| | | | ggGaccaaAgtggagatcaaaAGGactgtCgctgcaccatctgtcttcat |
| | | | cttcccAccatctgatgagcagttgaaatctggaactgcctctgttAAGt |
| | | | gcctgctgaataacttctatcccagagaggccaaagtacagtggaaggtg |
| | | | gataaTgccctccaaAGTggtaactcccaggagagtgtcacagagcagga |
| | | | cagcaaggacagcacctacagcctcagcagcaccctgacCctgagcaaag |
| | | | cagactaTgagaaacacaaagtctaTgcctgTgaagtcacccatcagggc |
| | | | ctgagcAGCccAgtcacaaagagcttcaacaggggagagtgt |
| Ab-HER- | 5037 | HC CDR1 | DTYIH |
| 82 | | (Kabat) | |
| | 5038 | HC CDR2 | RIYPTNGYTRYADSVKG |
| | | (Kabat) | |
| | 5039 | HC CDR3 | WGGDGFYAMDY |
| | | (Kabat) | |
| | 5040 | HC CDR1 | GFNIKDT |
| | | (Chothia) | |
| | 5041 | HC CDR2 | YPTNGY |
| | | (Chothia) | |
| | 5042 | HC CDR3 | WGGDGFYAMDY |
| | | (Chothia) | |
| | 5361 | HC CDR1 | GFNIKDTYIH |
| | 5362 | HC CDR2 | RIYPTNGYTRYADSVKG |
| | 5363 | HC CDR3 | WGGDGFYAMDY |
| | 5361 | HC CDR1 | GFNIKDTYIH |
| | 5362 | HC CDR2 | RIYPTNGYTRYADSVKG |
| | 5363 | HC CDR3 | WGGDGFYAMDY |
| | 5001 | VH | EVQLVESGGGLVQPGGSLRLSCAASGFNIKDTYIHWVRQAPGKGLEWVAR |
| | | | IYPTNGYTRYADSVKGRFTISADTSKNTAYLQMNSLRAEDTAVYYCSRWG |
| | | | GDGFYAMDYWGQGTLVTVSS |
| | 5002 | DNA VH | gaggttcagctggtggagtctggcggtggcctggtgcagccagggggctc |
| | | | actccgtttgtcctgtgcagcttctggcttcaacattaaagacacctata |
| | | | tacactgggtgcgtcaggccccgggtaagggcctggaatgggttgcaagg |
| | | | atttatcctacgaatggttatactagatatgccgatagcgtcaagggccg |
| | | | tttcactataagcgcagacacatccaaaaacacagcctacctgcagatga |
| | | | acagcctgcgtgctgaggacactgccgtctattattgttctagatgggga |
| | | | ggggacggcttctatgctatggacTACtggggtcaaggaaccctggtcac |
| | | | cgtctcctcg |
| | 5368 | Heavy Chain | EVQLVESGGGLVQPGGSLRLSCAASGFNIKDTYIHWVRQAPGKGLEWVAR |
| | | | IYPTNGYTRYADSVKGRFTISADTSKNTAYLQMNSLRAEDTAVYYCSRWG |
| | | | GDGFYAMDYWGQGTLVTVSSASTKGPSVFPLAPSSKSTSGGTAALGCLVK |
| | | | DYFPEPVTVSWNSGALTSGVHTFPAVLQSSGLYSLSSVVTVPSSSLGTQT |
| | | | YICNVNHKPSNTKVDKRVEPKSCDKTHTCPPCPAPELVGGPSVFLLPPKP |
| | | | KDTLMISRTPEVTCVVVDVSHEDPEVKFNWYVDGVEVHNAKTKPPEEQYN |
| | | | STLRVVSVLTVLHQDWLNGKEYKCKVSNKALPAPIEKTISKAKGQPREPQ |
| | | | VYTLPPSRDELTKNQVSLTCLVKGFYPSDIAVEWESNGQPENNYKTTPLV |
| | | | LDSDGSFFLYSKLTVDKSRWQQGNVFSCSVMHEALHNHYTQKSLSLSPGK |
| | 5369 | DNA Heavy | gaggttcagctggtggagtctggcggtggcctggtgcagccagggggctc |
| | | Chain | actccgtttgtcctgtgcagcttctggcttcaacattaaagacacctata |
| | | | tacactgggtgcgtcaggccccgggtaagggcctggaatgggttgcaagg |
| | | | atttatcctacgaatggttatactagatatgccgatagcgtcaagggccg |
| | | | tttcactataagcgcagacacatccaaaaacacagcctacctgcagatga |
| | | | acagcctgcgtgctgaggacactgccgtctattattgttctagatgggga |
| | | | ggggacggcttctatgctatggacTACtggggtcaaggaaccctggtcac |
| | | | cgtctcctcggcgtcgaccaagggcccatcggtcttccccctggcaccct |
| | | | cctccaagagcacctctgggggcacagcggccctgggctgcctggtcaag |
| | | | gactacttccccgaacctgtgacggtctcgtggaactcaggcgccctgac |
| | | | cagcggcgtgcacaccttcccggctgtcctacagtcctcaggactctact |
| | | | ccctcagcagcgtggtgaccgtgccctccagcagcttgggcacccagacc |
| | | | tacatctgcaacgtgaatcacaagcccagcaacaccaaggtggacaagaG |
| | | | agttgagcccaaatcttgtgacaaaactcacacatgcccaccgtgcccag |
| | | | cacctgaactcGtggggggaccgtcagtcttcctcCtccccccaaaaccc |
| | | | aaggacaccctcatgatctcccggacccctgaggtcacatgcgtggtggt |
| | | | ggacgtgagccacgaagaccctgaggtcaagttcaactggtacgtggacg |
| | | | gcgtggaggtgcataatgccaagacaaagccgcCggaggagcagtacaac |
| | | | agcacgCTccgtgtggtcagcgtcctcaccgtcctgcaccaggactggct |
| | | | gaatggcaaggagtacaagtgcaaggtctccaacaaagccctcccagccc |
| | | | ccatcgagaaaaccatctccaaagccaaagggcagccccgagaaccacag |
| | | | gtgtacaccctgcccccatcccgggaTgagCtgaccaagaaccaggtcag |
| | | | cctgacctgcctggtcaaaggcttctatcccagcgacatcgccgtggagt |
| | | | gggagagcaatgggcagccggagaacaactacaagaccacgcctcTcgtg |
| | | | ctggactccgacggctccttcttcctctacagcaagctcaccgtggacaa |
| | | | gagcaggtggcagcaggggaacgtcttctcatgctccgtgatgcatgagg |
| | | | ctctgcacaaccactacacgcagaagagcctctccctgtctccgggtaaa |
| | 5317 | LC CDR1 | RASQDVNTAVA |
| | | (Kabat) | |
| | 5318 | LC CDR2 | SASFLYS |
| | | (Kabat) | |
| | 5319 | LC CDR3 | QQHYTTPPT |
| | | (Kabat) | |
| | 5320 | LC CDR1 | RASQDVNTAVA |
| | | (Chothia) | |
| | 5321 | LC CDR2 | SASFLYS |
| | | (Chothia) | |
| | 5322 | LC CDR3 | QQHYTTPPT |
| | | (Chothia) | |
| | 5006 | VL | DIQMTQSPSSLSASVGDRVTITCRASQDVNTAVAWYQQKPGKAPKLLIYS |
| | | | ASFLYSGVPSRFSGSRSGTDFTLTISSLQPEDFATYYCQQHYTTPPTFGQ |
| | | | GTKVEIK |
| | 5005 | DNA VL | gatatccagatgacccagtccccgagctccctgtccgcctctgtgggcga |
| | | | tagggtcaccatcacctgccgtgccagtcaggatgtgaatactgctgtag |
| | | | cctggtatcaacagaaaccaggaaaagctccgaaactactgatttactcg |
| | | | gcatccttcctcTACtctggagtcccttctcgcttctctggatccagatc |
| | | | tgggacggatttcactctgaccatcagcagtctgcagccggaagacttcg |
| | | | caacttattactgtcagcaacattatactactcctcccacgttcggacag |
| | | | ggtaccaaggtggagatcaaa |
| | 5036 | Light Chain | DIQMTQSPSSLSASVGDRVTITCRASQDVNTAVAWYQQKPGKAPKLLIYS |
| | | (hIgG kappa) | ASFLYSGVPSRFSGSRSGTDFTLTISSLQPEDFATYYCQQHYTTPPTFGQ |
| | | | GTKVEIKRTVAAPSVFIFPPSDEQLKSGTASVVCLLNNFYPREAKVQWKV |
| | | | DNALQSGNSQESVTEQDSKDSTYSLSSTLTLSKADYEKHKVYACEVTHQG |
| | | | LSSPVTKSENRGEC |
| | 5035 | DNA Light | gatatccagatgacccagtccccgagctccctgtccgcctctgtgggcga |
| | | Chain (hIgG | tagggtcaccatcacctgccgtgccagtcaggatgtgaatactgctgtag |
| | | kappa) | cctggtatcaacagaaaccaggaaaagctccgaaactactgatttactcg |
| | | | gcatccttcctcTACtctggagtcccttctcgcttctctggatccagatc |
| | | | tgggacggatttcactctgaccatcagcagtctgcagccggaagacttcg |
| | | | caacttattactgtcagcaacattatactactcctcccacgttcggacag |
| | | | ggtaccaaggtggagatcaaacgaactgtggctgcaccatctgtcttcat |
| | | | cttcccgccatctgatgagcagttgaaatctggaactgcctctgttgtgt |
| | | | gcctgctgaataacttctatcccagagaggccaaagtacagtggaaggtg |
| | | | gataacgccctccaatcgggtaactcccaggagagtgtcacagagcagga |
| | | | cagcaaggacagcacctacagcctcagcagcaccctgacgctgagcaaag |
| | | | cagactacgagaaacacaaagtctacgcctgcgaagtcacccatcagggc |
| | | | ctgagctcgcccgtcacaaagagcttcaacaggggagagtgt |
| | 5370 | DARPIN | GSDLGKKLLEAARAGQDDEVRILMANGADVNAHDFYGITPLHLAANFGHL |
| | | | EIVEVLLKHGADVNAFDYDNTPLHLAADAGHLEIVEVLLKYGADVNASDR |
| | | | DGHTPLHLAAREGHLEIVEVLLKNGADVNAQDKFGKTAFDISIDNGNEDL |
| | | | AEILQKL |
| | 5371 | DARPIN | GGCTCTGATCTGGGAAAAAAGCTTCTgGAGGCtGCcAGAGCtGGACAGGA |
| | | DNA | tGAtGAAGTGagaATACTGATGGCTAAtGGTGCTGATGTGAATGCCCAtG |
| | | | ATTTTTATGGAATCACTCCCTTACACTTAGCTGCCAATTTtGGGCACCTg |
| | | | GAGATTGTGGAAGTGCTCCTGAAGCATGGaGCAGATGTAAAtGCATTtGA |
| | | | TTAtGATAACACTCCACTGCACCTGGCtGCAGATGCtGGACATCTGGAGA |
| | | | TtGTGGAAGTACTGTTAAAATAGGAGCAGAtGTGAATGCATCtGACaga |
| | | | GATGGACATACACCACTGCACCTGGCAGCTagaGAGGGACATCTTGAAAT |
| | | | TGTTGAAGTCCTGCTTAAGAAtGGTGCtGATGTCAATGCCCAGGACAAGT |
| | | | TTGGGAAGACAGCTTTTGACATTTCAATtGATAAtGGAAAtGAGGATCTG |
| | | | GCtGAAATACTTCAGAAATTG |
| | 5372 | Light Chain | GSDLGKKLLEAARAGQDDEVRILMANGADVNAHDFYGITPLHLAANFGHL |
| | | | EIVEVLLKHGADVNAFDYDNTPLHLAADAGHLEIVEVLLKYGADVNASDR |
| | | | DGHTPLHLAAREGHLEIVEVLLKNGADVNAQDKFGKTAFDISIDNGNEDL |
| | | | AEILQKLGGGGSGGGGSGGGGSDIQMTQSPSSLSASVGDRVTITCRASQD |
| | | | VNTAVAWYQQKPGKAPKLLIYSASFLYSGVPSRESGSRSGTDFTLTISSL |
| | | | QPEDFATYYCQQHYTTPPTFGQGTKVEIKRTVAAPSVFIFPPSDEQLKSG |
| | | | TASVVCLLNNFYPREAKVQWKVDNALQSGNSQESVTEQDSKDSTYSLSST |
| | | | LTLSKADYEKHKVYACEVTHQGLSSPVTKSFNRGEC |
| | 5373 | Light Chain | GGCTCTGATCTGGGAAAAAAGCTTCTgGAGGCtGCcAGAGCtGGACAGGA |
| | | DNA | tGAtGAAGTGagaATACTGATGGCTAAtGGTGCTGATGTGAATGCCCAtG |
| | | | ATTTTTATGGAATCACTCCCTTACACTTAGCTGCCAATTItGGGCACCTg |
| | | | GAGATTGTGGAAGTGCTCCTGAAGCATGGaGCAGATGTAAAtGCATTtGA |
| | | | TTAtGATAACACTCCACTGCACCTGGCtGCAGATGCtGGACATCTGGAGA |
| | | | TtGTGGAAGTACTGTTAAAATAtGGAGCAGAtGTGAATGCATCtGACaga |
| | | | GATGGACATACACCACTGCACCTGGCAGCTagaGAGGGACATCTTGAAAT |
| | | | TGTTGAAGTCCTGCTTAAGAAtGGTGCtGATGTCAATGCCCAGGACAAGT |
| | | | TTGGGAAGACAGCTTTTGACATTTCAATtGATAAtGGAAAtGAGGATCTG |
| | | | GCtGAAATACTICAGAAATTGggtggtggtggatctggaggaggaggaAG |
| | | | TggaggtggaggtTCTgatatccagatgacccagtccccgagctccctgt |
| | | | ccgcctctgtgggcgatagggtcaccatcacctgccgtgccagtcaggat |
| | | | gtgaatactgctgtagcctggtatcaacagaaaccaggaaaagctccgaa |
| | | | actactgatttactcggcatccttcctcTACtctggagtcccttctcgct |
| | | | tctctggatccagatctgggacggatttcactctgaccatcagcagtctg |
| | | | cagccggaagacttcgcaacttattactgtcagcaacattatactactcc |
| | | | tcccacgttcggacagggtaccaaggtggagatcaaacgaactgtggctg |
| | | | caccatctgtcttcatcttcccgccatctgatgagcagttgaaatctgga |
| | | | actgcctctgttgtgtgcctgctgaataacttctatcccagagaggccaa |
| | | | agtacagtggaaggtggataacgccctccaatcgggtaactcccaggaga |
| | | | gtgtcacagagcaggacagcaaggacagcacctacagcctcagcagcacc |
| | | | ctgacgctgagcaaagcagactacgagaaacacaaagtctacgcctgcga |
| | | | agtcacccatcagggcctgagctcgcccgtcacaaagagcttcaacaggg |
| | | | gagagtgt |

TABLE 3B
Exemplary Anti-HER2 Antibody Variants Based on HER-75 with Heavy Chain
Mutations

| | SEQ | | |
|---|---|---|---|
| Ab ID | ID NO | Description | Sequence |
| Ab-HER- | 6510 | HC CDR3 | WGGWGFYAFAL |
| 88 | | (Kabat) | |
| | 6511 | VH | EVQLVESGGGLVQPGGSLRLSCAASGFNIKDTYIHWVRQAPGKGLEWVAR |
| | | | IYPTNGYTRYADSVKGRFTISADTSKNTAYLQMNSLRAEDTAVYYCSRWG |
| | | | GWGFYAFALWGQGTLVTVSS |
| | 6512 | DNA VH | gaggttcagctggtggagtctggAggtggcctggtgcagccagggggctc |
| | | | actcAGAttgtcctgtgcagcttctggcttcaacattaaagacacctata |
| | | | tacactgggtgagacaggccccAggtaagggcctggaatgggttgcaagg |
| | | | atttatcctacCaatggttatactagatatgcTgatTCTgtcaagggcAG |
| | | | AttcactataTCTgcagacacatccaaaaacacagcctacctgcagatga |
| | | | acagcctgAGAgctgaggacactgcTgtctattattgttctagatgggga |
| | | | gggTGGggcttctatgctTTTGCCCTGtggggtcaaggaaccctggtcac |
| | | | AgtctcctcT |
| | 6513 | Heavy Chain | EVQLVESGGGLVQPGGSLRLSCAASGFNIKDTYIHWVRQAPGKGLEWVAR |
| | | (hIgG1) | IYPTNGYTRYADSVKGRFTISADTSKNTAYLQMNSLRAEDTAVYYCSRWG |
| | | | GWGFYAFALWGQGTLVTVSSASTKGPSVFPLAPSSKSTSGGTAALGCLVK |
| | | | DYFPEPVTVSWNSGALTSGVHTFPAVLQSSGLYSLSSVVTVPSSSLGTQT |
| | | | YICNVNHKPSNTKVDKRVEPKSCDKTHTCPPCPAPELVGGPSVFLLPPKP |
| | | | KDTLMISRTPEVTCVVVDVSHEDPEVKFNWYVDGVEVHNAKTKPPEEQYN |
| | | | STLRVVSVLTVLHQDWLNGKEYKCKVSNKALPAPIEKTISKAKGQPREPQ |
| | | | VYTLPPSRDELTKNQVSLTCLVKGFYPSDIAVEWESNGQPENNYKTTPLV |
| | | | LDSDGSFFLYSKLTVDKSRWQQGNVFSCSVMHEALHNHYTQKSLSLSPGK |
| | 6514 | DNA Heavy | gaggttcagctggtggagtctggAggtggcctggtgcagccagggggctc |
| | | Chain | actcAGAttgtcctgtgcagcttctggcttcaacattaaagacacctata |
| | | (hIgG1) | tacactgggtgagacaggccccAggtaagggcctggaatgggttgcaagg |
| | | | atttatcctacCaatggttatactagatatgcTgatTCTgtcaagggcAG |
| | | | AttcactataTCTgcagacacatccaaaaacacagcctacctgcagatga |
| | | | acagcctgAGAgctgaggacactgcTgtctattattgttctagatgggga |
| | | | gggTGGggcttctatgctTTTGCCCTGtggggtcaaggaaccctggtcac |
| | | | AgtctcctcTgcCtcTaccaagggcccatcTgtcttccccctggcaccct |
| | | | cctccaagagcacctctgggggcacagcTgccctgggctgcctggtcaag |
| | | | gactacttcccTgaacctgtgacAgtctcCtggaactcaggAgccctgac |
| | | | cagTggAgtgcacaccttcccTgctgtcctacagtcctcaggactctact |
| | | | ccctcagcTCTgtggtgacAgtgccctccagcagcttgggcacccagacc |
| | | | tacatctgcaaTgtgaatcacaagcccagcaacaccaaggtggacaagaG |
| | | | agttgagcccaaatcttgtgacaaaactcacacatgcccaccTtgcccag |
| | | | cacctgaactGGtggggggaccAtcagtcttcctcCtccccccaaaaccc |
| | | | aaggacaccctcatgatctccAGAacccctgaggtcacatgTgtggtggt |
| | | | ggaTgtgagccaTgaagaccctgaggtcaagttcaactggtaTgtggaTg |
| | | | gAgtggaggtgcataatgccaagacaaagccCcCTgaggagcagtacaac |
| | | | agcacTCTcAGAgtggtcTCTgtcctcacAgtcctgcaccaggactggct |
| | | | gaatggcaaggagtacaagtgcaaggtctccaacaaagccctcccagccc |
| | | | ccatTgagaaaaccatctccaaagccaaagggcagcccAGAgaaccacag |
| | | | gtgtacaccctgcccccatccAGAgaTgagCtgaccaagaaccaggtcag |
| | | | cctgacctgcctggtcaaaggcttctatcccTCTgacatIgcTgtggagt |
| | | | gggagagcaatgggcagccTgagaacaactacaagaccacAcctcTTgtg |
| | | | ctggactcTgaTggctccttcttcctctacagcaagctcacAgtggacaa |
| | | | gagcaggtggcagcaggggaaTgtcttctcatgcTCTgtgatgcatgagg |
| | | | ctctgcacaaccactacacCcagaagagcctctccctgtctccAggtaaa |
| Ab-HER- | 6515 | HC CDR3 | WGGWGFYAFAY |
| 89 | | (Kabat) | |
| | 6516 | VH | EVQLVESGGGLVQPGGSLRLSCAASGFNIKDTYIHWVRQAPGKGLEWVAR |
| | | | IYPTNGYTRYADSVKGRFTISADTSKNTAYLQMNSLRAEDTAVYYCSRWG |
| | | | GWGFYAFAYWGQGTLVTVSS |
| | 6517 | DNA VH | gaggttcagctggtggagtctggAggtggcctggtgcagccagggggctc |
| | | | actcAGAttgtcctgtgcagcttctggcttcaacattaaagacacctata |
| | | | tacactgggtgagacaggccccAggtaagggcctggaatgggttgcaagg |
| | | | atttatcctacCaatggttatactagatatgcTgatTCTgtcaagggcAG |
| | | | AttcactataTCTgcagacacatccaaaaacacagcctacctgcagatga |
| | | | acagcctgAGAgctgaggacactgcTgtctattattgttctagatgggga |
| | | | gggTGGggcttctatgctTTTGCCTACtggggtcaaggaaccctggtcac |
| | | | AgtctcctcT |
| | 6518 | Heavy Chain | EVQLVESGGGLVQPGGSLRLSCAASGFNIKDTYIHWVRQAPGKGLEWVAR |
| | | (hIgG1) | IYPTNGYTRYADSVKGRFTISADTSKNTAYLQMNSLRAEDTAVYYCSRWG |
| | | | GWGFYAFAYWGQGTLVTVSSASTKGPSVFPLAPSSKSTSGGTAALGCLVK |
| | | | DYFPEPVTVSWNSGALTSGVHTFPAVLQSSGLYSLSSVVTVPSSSLGTQT |
| | | | YICNVNHKPSNTKVDKRVEPKSCDKTHTCPPCPAPELVGGPSVFLLPPKP |
| | | | KDTLMISRTPEVTCVVVDVSHEDPEVKFNWYVDGVEVHNAKTKPPEEQYN |
| | | | STLRVVSVLTVLHQDWLNGKEYKCKVSNKALPAPIEKTISKAKGQPREPQ |
| | | | VYTLPPSRDELTKNQVSLTCLVKGFYPSDIAVEWESNGQPENNYKTTPLV |
| | | | LDSDGSFFLYSKLTVDKSRWQQGNVFSCSVMHEALHNHYTQKSLSLSPGK |
| | 6519 | DNA Heavy | gaggttcagctggtggagtctggAggtggcctggtgcagccagggggctc |
| | | Chain | actcAGAttgtcctgtgcagcttctggcttcaacattaaagacacctata |
| | | (hIgG1) | tacactgggtgagacaggccccAggtaagggcctggaatgggttgcaagg |
| | | | atttatcctacCaatggttatactagatatgcTgatTCTgtcaagggcAG |
| | | | AttcactataTCTgcagacacatccaaaaacacagcctacctgcagatga |
| | | | acagcctgAGAgctgaggacactgcTgtctattattgttctagatgggga |
| | | | gggTGGggcttctatgctTTTGCCTACtggggtcaaggaaccctggtcac |
| | | | AgtctcctcTgcCtcTaccaagggcccatcTgtcttccccctggcaccct |
| | | | cctccaagagcacctctgggggcacagcTgccctgggctgcctggtcaag |
| | | | gactacttcccTgaacctgtgacAgtctcCtggaactcaggAgccctgac |
| | | | cagTggAgtgcacaccttcccTgctgtcctacagtcctcaggactctact |
| | | | ccctcagcTCTgtggtgacAgtgccctccagcagcttgggcacccagacc |
| | | | tacatctgcaaTgtgaatcacaagcccagcaacaccaaggtggacaagaG |
| | | | agttgagcccaaatcttgtgacaaaactcacacatgcccaccTtgcccag |
| | | | cacctgaactGGtggggggaccAtcagtcttcctcCtccccccaaaaccc |
| | | | aaggacaccctcatgatctccAGAacccctgaggtcacatgTgtggtggt |
| | | | ggaTgtgagccaTgaagaccctgaggtcaagttcaactggtaTgtggaTg |
| | | | gAgtggaggtgcataatgccaagacaaagccCcCTgaggagcagtacaac |
| | | | agcacTCTcAGAgtggtcTCTgtcctcacAgtcctgcaccaggactggct |
| | | | gaatggcaaggagtacaagtgcaaggtctccaacaaagccctcccagccc |
| | | | ccatTgagaaaaccatctccaaagccaaagggcagcccAGAgaaccacag |
| | | | gtgtacaccctgcccccatccAGAgaTgagCtgaccaagaaccaggtcag |
| | | | cctgacctgcctggtcaaaggcttctatcccTCTgacatTgcTgtggagt |
| | | | gggagagcaatgggcagccTgagaacaactacaagaccacAcctcTTgtg |
| | | | ctggactcTgaTggctccttcttcctctacagcaagctcacAgtggacaa |
| | | | gagcaggtggcagcaggggaaTgtcttctcatgcTCTgtgatgcatgagg |
| | | | ctctgcacaaccactacacCcagaagagcctctccctgtctccAggtaaa |
| Ab-HER- | 6520 | HC CDR3 | WGGWGFYAFDL |
| 90 | | (Kabat) | |
| | 6521 | VH | EVQLVESGGGLVQPGGSLRLSCAASGFNIKDTYIHWVRQAPGKGLEWVAR |
| | | | IYPTNGYTRYADSVKGRFTISADTSKNTAYLQMNSLRAEDTAVYYCSRWG |
| | | | GWGFYAFDLWGQGTLVTVSS |
| | 6522 | DNA VH | gaggttcagctggtggagtctggAggtggcctggtgcagccagggggctc |
| | | | actcAGAttgtcctgtgcagcttctggcttcaacattaaagacacctata |
| | | | tacactgggtgagacaggccccAggtaagggcctggaatgggttgcaagg |
| | | | atttatcctacCaatggttatactagatatgcTgatTCTgtcaagggcAG |
| | | | AttcactataTCTgcagacacatccaaaaacacagcctacctgcagatga |
| | | | acagcctgAGAgctgaggacactgcTgtctattattgttctagatgggga |
| | | | gggTGGggcttctatgctTTTGACCTGtggggtcaaggaaccctggtcac |
| | | | AgtctcctcT |
| | 6523 | Heavy Chain | EVQLVESGGGLVQPGGSLRLSCAASGFNIKDTYIHWVRQAPGKGLEWVAR |
| | | (hIgG1) | IYPTNGYTRYADSVKGRFTISADTSKNTAYLQMNSLRAEDTAVYYCSRWG |
| | | | GWGFYAFDLWGQGTLVTVSSASTKGPSVFPLAPSSKSTSGGTAALGCLVK |
| | | | DYFPEPVTVSWNSGALTSGVHTFPAVLQSSGLYSLSSVVTVPSSSLGTQT |
| | | | YICNVNHKPSNTKVDKRVEPKSCDKTHTCPPCPAPELVGGPSVFLLPPKP |
| | | | KDTLMISRTPEVTCVVVDVSHEDPEVKFNWYVDGVEVHNAKTKPPEEQYN |
| | | | STLRVVSVLTVLHQDWLNGKEYKCKVSNKALPAPIEKTISKAKGQPREPQ |
| | | | VYTLPPSRDELTKNQVSLTCLVKGFYPSDIAVEWESNGQPENNYKTTPLV |
| | | | LDSDGSFFLYSKLTVDKSRWQQGNVFSCSVMHEALHNHYTQKSLSLSPGK |
| | 6524 | DNA Heavy | gaggttcagctggtggagtctggAggtggcctggtgcagccagggggctc |
| | | Chain | actcAGAttgtcctgtgcagcttctggcttcaacattaaagacacctata |
| | | (hIgG1) | tacactgggtgagacaggccccAggtaagggcctggaatgggttgcaagg |
| | | | atttatcctacCaatggttatactagatatgcTgatTCTgtcaagggcAG |
| | | | AttcactataTCTgcagacacatccaaaaacacagcctacctgcagatga |
| | | | acagcctgAGAgctgaggacactgcIgtctattattgttctagatgggga |
| | | | gggTGGggcttctatgctTTTGACCTGtggggtcaaggaaccctggtcac |
| | | | AgtctcctcTgcCtcTaccaagggcccatcTgtcttccccctggcaccct |
| | | | cctccaagagcacctctgggggcacagcTgccctgggctgcctggtcaag |
| | | | gactacttcccIgaacctgtgacAgtctcCtggaactcaggAgccctgac |
| | | | cagTggAgtgcacaccttcccTgctgtcctacagtcctcaggactctact |
| | | | ccctcagcTCTgtggtgacAgtgccctccagcagcttgggcacccagacc |
| | | | tacatctgcaaTgtgaatcacaagcccagcaacaccaaggtggacaagaG |
| | | | agttgagcccaaatcttgtgacaaaactcacacatgcccaccTtgcccag |
| | | | cacctgaactGGtggggggaccAtcagtcttcctcCtccccccaaaaccc |
| | | | aaggacaccctcatgatctccAGAacccctgaggtcacatgTgtggtggt |
| | | | ggaTgtgagccaTgaagaccctgaggtcaagttcaactggtaTgtggaTg |
| | | | gAgtggaggtgcataatgccaagacaaagccCcCTgaggagcagtacaac |
| | | | agcacTCTcAGAgtggtcTCTgtcctcacAgtcctgcaccaggactggct |
| | | | gaatggcaaggagtacaagtgcaaggtctccaacaaagccctcccagccc |
| | | | ccatTgagaaaaccatctccaaagccaaagggcagcccAGAgaaccacag |
| | | | gtgtacaccctgcccccatccAGAgaTgagCtgaccaagaaccaggtcag |
| | | | cctgacctgcctggtcaaaggcttctatcccTCTgacatIgcTgtggagt |
| | | | gggagagcaatgggcagccTgagaacaactacaagaccacAcctcTTgtg |
| | | | ctggactcTgaTggctccttcttcctctacagcaagctcacAgtggacaa |
| | | | gagcaggtggcagcaggggaaTgtcttctcatgcTCTgtgatgcatgagg |
| | | | ctctgcacaaccactacacCcagaagagcctctccctgtctccAggtaaa |
| Ab-HER- | 6525 | HC CDR3 | WGGWGFYAMAL |
| 91 | | (Kabat) | |
| | 6526 | VH | EVQLVESGGGLVQPGGSLRLSCAASGFNIKDTYIHWVRQAPGKGLEWVAR |
| | | | IYPTNGYTRYADSVKGRFTISADTSKNTAYLQMNSLRAEDTAVYYCSRWG |
| | | | GWGFYAMALWGQGTLVTVSS |
| | 6527 | DNA VH | gaggttcagctggtggagtctggAggtggcctggtgcagccagggggctc |
| | | | actcAGAttgtcctgtgcagcttctggcttcaacattaaagacacctata |
| | | | tacactgggtgagacaggccccAggtaagggcctggaatgggttgcaagg |
| | | | atttatcctacCaatggttatactagatatgcTgatTCTgtcaagggcAG |
| | | | AttcactataTCTgcagacacatccaaaaacacagcctacctgcagatga |
| | | | acagcctgAGAgctgaggacactgcTgtctattattgttctagatgggga |
| | | | gggTGGggcttctatgctATGGCCCTGtggggtcaaggaaccctggtcac |
| | | | AgtctcctcT |
| | 6528 | Heavy Chain | EVQLVESGGGLVQPGGSLRLSCAASGFNIKDTYIHWVRQAPGKGLEWVAR |
| | | (hIgG1) | IYPTNGYTRYADSVKGRFTISADTSKNTAYLQMNSLRAEDTAVYYCSRWG |
| | | | GWGFYAMALWGQGTLVTVSSASTKGPSVFPLAPSSKSTSGGTAALGCLVK |
| | | | DYFPEPVTVSWNSGALTSGVHTFPAVLQSSGLYSLSSVVTVPSSSLGTQT |
| | | | YICNVNHKPSNTKVDKRVEPKSCDKTHTCPPCPAPELVGGPSVFLLPPKP |
| | | | KDTLMISRTPEVTCVVVDVSHEDPEVKFNWYVDGVEVHNAKTKPPEEQYN |
| | | | STLRVVSVLTVLHQDWLNGKEYKCKVSNKALPAPIEKTISKAKGQPREPQ |
| | | | VYTLPPSRDELTKNQVSLTCLVKGFYPSDIAVEWESNGQPENNYKTTPLV |
| | | | LDSDGSFFLYSKLTVDKSRWQQGNVFSCSVMHEALHNHYTQKSLSLSPGK |
| | 6529 | DNA Heavy | gaggttcagctggtggagtctggAggtggcctggtgcagccagggggctc |
| | | Chain | actcAGAttgtcctgtgcagcttctggcttcaacattaaagacacctata |
| | | (hIgG1) | tacactgggtgagacaggccccAggtaagggcctggaatgggttgcaagg |
| | | | atttatcctacCaatggttatactagatatgcTgatTCTgtcaagggcAG |
| | | | AttcactataTCTgcagacacatccaaaaacacagcctacctgcagatga |
| | | | acagcctgAGAgctgaggacactgcTgtctattattgttctagatgggga |
| | | | gggTGGggcttctatgctATGGCCCTGtggggtcaaggaaccctggtcac |
| | | | AgtctcctcTgcCtcTaccaagggcccatcTgtcttccccctggcaccct |
| | | | cctccaagagcacctctgggggcacagcTgccctgggctgcctggtcaag |
| | | | gactacttcccIgaacctgtgacAgtctcCtggaactcaggAgccctgac |
| | | | cagTggAgtgcacaccttcccTgctgtcctacagtcctcaggactctact |
| | | | ccctcagcTCTgtggtgacAgtgccctccagcagcttgggcacccagacc |
| | | | tacatctgcaaTgtgaatcacaagcccagcaacaccaaggtggacaagaG |
| | | | agttgagcccaaatcttgtgacaaaactcacacatgcccaccTtgcccag |
| | | | cacctgaactGGtggggggaccAtcagtcttcctcCtccccccaaaaccc |
| | | | aaggacaccctcatgatctccAGAacccctgaggtcacatgTgtggtggt |
| | | | ggaTgtgagccaTgaagaccctgaggtcaagttcaactggtaTgtggaTg |
| | | | gAgtggaggtgcataatgccaagacaaagccCcCTgaggagcagtacaac |
| | | | agcacTCTcAGAgtggtcTCTgtcctcacAgtcctgcaccaggactggct |
| | | | gaatggcaaggagtacaagtgcaaggtctccaacaaagccctcccagccc |
| | | | ccatTgagaaaaccatctccaaagccaaagggcagcccAGAgaaccacag |
| | | | gtgtacaccctgcccccatccAGAgaTgagCtgaccaagaaccaggtcag |
| | | | cctgacctgcctggtcaaaggcttctatcccTCTgacatIgcTgtggagt |
| | | | gggagagcaatgggcagccTgagaacaactacaagaccacAcctcTTgtg |
| | | | ctggactcTgaTggctccttcttcctctacagcaagctcacAgtggacaa |
| | | | gagcaggtggcagcaggggaaTgtcttctcatgcTCTgtgatgcatgagg |
| | | | ctctgcacaaccactacacCcagaagagcctctccctgtctccAggtaaa |
| Ab-HER- | 6530 | HC CDR3 | WGGDGFYAFAL |
| 92 | | (Kabat) | |
| | 6531 | VH | EVQLVESGGGLVQPGGSLRLSCAASGFNIKDTYIHWVRQAPGKGLEWVAR |
| | | | IYPTNGYTRYADSVKGRFTISADTSKNTAYLQMNSLRAEDTAVYYCSRWG |
| | | | GDGFYAFALWGQGTLVTVSS |
| | 6532 | DNA VH | gaggttcagctggtggagtctggAggtggcctggtgcagccagggggctc |
| | | | actcAGAttgtcctgtgcagcttctggcttcaacattaaagacacctata |
| | | | tacactgggtgagacaggccccAggtaagggcctggaatgggttgcaagg |
| | | | atttatcctacCaatggttatactagatatgcTgatTCTgtcaagggcAG |
| | | | AttcactataTCTgcagacacatccaaaaacacagcctacctgcagatga |
| | | | acagcctgAGAgctgaggacactgcTgtctattattgttctagatgggga |
| | | | gggGATggcttctatgctTTTGCCCTGtggggtcaaggaaccctggtcac |
| | | | AgtctcctcT |
| | 6533 | Heavy Chain | EVQLVESGGGLVQPGGSLRLSCAASGFNIKDTYIHWVRQAPGKGLEWVAR |
| | | (hIgG1) | IYPTNGYTRYADSVKGRFTISADTSKNTAYLQMNSLRAEDTAVYYCSRWG |
| | | | GDGFYAFALWGQGTLVTVSSASTKGPSVFPLAPSSKSTSGGTAALGCLVK |
| | | | DYFPEPVTVSWNSGALTSGVHTFPAVLQSSGLYSLSSVVTVPSSSLGTQT |
| | | | YICNVNHKPSNTKVDKRVEPKSCDKTHTCPPCPAPELVGGPSVFLLPPKP |
| | | | KDTLMISRTPEVTCVVVDVSHEDPEVKFNWYVDGVEVHNAKTKPPEEQYN |
| | | | STLRVVSVLTVLHQDWLNGKEYKCKVSNKALPAPIEKTISKAKGQPREPQ |
| | | | VYTLPPSRDELTKNQVSLTCLVKGFYPSDIAVEWESNGQPENNYKTTPLV |
| | | | LDSDGSFFLYSKLTVDKSRWQQGNVFSCSVMHEALHNHYTQKSLSLSPGK |
| | 6534 | DNA Heavy | gaggttcagctggtggagtctggAggtggcctggtgcagccagggggctc |
| | | Chain | actcAGAttgtcctgtgcagcttctggcttcaacattaaagacacctata |
| | | (hIgG1) | tacactgggtgagacaggccccAggtaagggcctggaatgggttgcaagg |
| | | | atttatcctacCaatggttatactagatatgcTgatTCTgtcaagggcAG |
| | | | AttcactataTCTgcagacacatccaaaaacacagcctacctgcagatga |
| | | | acagcctgAGAgctgaggacactgcTgtctattattgttctagatgggga |
| | | | gggGATggcttctatgctTTTGCCCTGtggggtcaaggaaccctggtcac |
| | | | AgtctcctcTgcCtcTaccaagggcccatcTgtcttccccctggcaccct |
| | | | cctccaagagcacctctgggggcacagcTgccctgggctgcctggtcaag |
| | | | gactacttcccTgaacctgtgacAgtctcCtggaactcaggAgccctgac |
| | | | cagTggAgtgcacaccttcccTgctgtcctacagtcctcaggactctact |
| | | | ccctcagcTCTgtggtgacAgtgccctccagcagcttgggcacccagacc |
| | | | tacatctgcaaTgtgaatcacaagcccagcaacaccaaggtggacaagaG |
| | | | agttgagcccaaatcttgtgacaaaactcacacatgcccaccTtgcccag |
| | | | cacctgaactGGtggggggaccAtcagtcttcctcCtccccccaaaaccc |
| | | | aaggacaccctcatgatctccAGAacccctgaggtcacatgTgtggtggt |
| | | | ggaTgtgagccaTgaagaccctgaggtcaagttcaactggtaTgtggaTg |
| | | | gAgtggaggtgcataatgccaagacaaagccCcCTgaggagcagtacaac |
| | | | agcacTCTcAGAgtggtcTCTgtcctcacAgtcctgcaccaggactggct |
| | | | gaatggcaaggagtacaagtgcaaggtctccaacaaagccctcccagccc |
| | | | ccatTgagaaaaccatctccaaagccaaagggcagcccAGAgaaccacag |
| | | | gtgtacaccctgcccccatccAGAgaTgagCtgaccaagaaccaggtcag |
| | | | cctgacctgcctggtcaaaggcttctatcccTCTgacatIgcTgtggagt |
| | | | gggagagcaatgggcagccTgagaacaactacaagaccacAcctcTTgtg |
| | | | ctggactcTgaTggctccttcttcctctacagcaagctcacAgtggacaa |
| | | | gagcaggtggcagcaggggaaTgtcttctcatgcTCTgtgatgcatgagg |
| | | | ctctgcacaaccactacacCcagaagagcctctccctgtctccAggtaaa |

TABLE 3C
Exemplary Anti-HER2 Antibody Variants Based on HER-78 with Heavy Chain
Mutations

| | SEQ | | |
|---|---|---|---|
| Ab ID | ID NO | Description | Sequence |
| Ab-HER- | 6535 | HC CDR3 | WGGWGFYAFAL |
| 97 | | (Kabat) | |
| | 6536 | VH | EVQLVESGGGLVQPGGSLRLSCAASGFNIKDTYIHWVRQAPGKGLEWVAR |
| | | | IYPTNGYTRYADSVKGRFTISADTSKNTAYLQMNSLRAEDTAVYYCSRWG |
| | | | GWGFYAFALWGQGTLVTVSS |
| | 6537 | DNA VH | gaggttcagctggtggagtctggTggtggcctGgtgcagccagggggctc |
| | | | actcAGAttgtcctgtgcagcttctggcttcaacattaaagacacctata |
| | | | tacactgggtgAGAcaggccccTggAaagggcctggaatgggttgcaagg |
| | | | atttatcctacTaatggttatactagatatgcAgatagTgtcaagggcAG |
| | | | AttcactataagTgcagacacatccaaaaacacagcctacctgcagatga |
| | | | acagcctgAGAgctgaggacactgcAgtctattattgttctagatgggga |
| | | | gggTGGggcttctatgctTTTGCCCTGtggggtcaaggaaccctggtcac |
| | | | AgtctcctcT |
| Ab-HER- | 6538 | HC CDR3 | WGGWGFYAFAY |
| 98 | | (Kabat) | |
| | 6539 | VH | EVQLVESGGGLVQPGGSLRLSCAASGFNIKDTYIHWVRQAPGKGLEWVAR |
| | | | IYPTNGYTRYADSVKGRFTISADTSKNTAYLQMNSLRAEDTAVYYCSRWG |
| | | | GWGFYAFAYWGQGTLVTVSS |
| | 6540 | DNA VH | gaggttcagctggtggagtctggTggtggcctGgtgcagccagggggctc |
| | | | actcAGAttgtcctgtgcagcttctggcttcaacattaaagacacctata |
| | | | tacactgggtgAGAcaggccccTggAaagggcctggaatgggttgcaagg |
| | | | atttatcctacTaatggttatactagatatgcAgatagTgtcaagggcAG |
| | | | AttcactataagTgcagacacatccaaaaacacagcctacctgcagatga |
| | | | acagcctgAGAgctgaggacactgcAgtctattattgttctagatgggga |
| | | | gggTGGggcttctatgctTTTGCCTACtggggtcaaggaaccctggtcac |
| | | | AgtctcctcT |
| Ab-HER- | 6541 | HC CDR3 | WGGWGFYAFDL |
| 99 | | (Kabat) | |
| | 6542 | VH | EVQLVESGGGLVQPGGSLRLSCAASGENIKDTYIHWVRQAPGKGLEWVAR |
| | | | IYPTNGYTRYADSVKGRFTISADTSKNTAYLQMNSLRAEDTAVYYCSRWG |
| | | | GWGFYAFDLWGQGTLVTVSS |
| | 6543 | DNA VH | gaggttcagctggtggagtctggTggtggcctGgtgcagccagggggctc |
| | | | actcAGAttgtcctgtgcagcttctggcttcaacattaaagacacctata |
| | | | tacactgggtgAGAcaggccccTggAaagggcctggaatgggttgcaagg |
| | | | atttatcctacTaatggttatactagatatgcAgatagTgtcaagggcAG |
| | | | AttcactataagTgcagacacatccaaaaacacagcctacctgcagatga |
| | | | acagcctgAGAgctgaggacactgcAgtctattattgttctagatgggga |
| | | | gggTGGggcttctatgctTTTgacCTGtggggtcaaggaaccctggtcac |
| | | | AgtctcctcT |
| Ab-HER- | 6544 | HC CDR3 | WGGWGFYAMAL |
| 100 | | (Kabat) | |
| | 6545 | VH | EVQLVESGGGLVQPGGSLRLSCAASGFNIKDTYIHWVRQAPGKGLEWVAR |
| | | | IYPTNGYTRYADSVKGRFTISADTSKNTAYLQMNSLRAEDTAVYYCSRWG |
| | | | GWGFYAMALWGQGTLVTVSS |
| | 6546 | DNA VH | gaggttcagctggtggagtctggTggtggcctGgtgcagccagggggctc |
| | | | actcAGAttgtcctgtgcagcttctggcttcaacattaaagacacctata |
| | | | tacactgggtgAGAcaggccccIggAaagggcctggaatgggttgcaagg |
| | | | atttatcctacTaatggttatactagatatgcAgatagTgtcaagggcAG |
| | | | AttcactataagTgcagacacatccaaaaacacagcctacctgcagatga |
| | | | acagcctgAGAgctgaggacactgcAgtctattattgttctagatgggga |
| | | | gggTGGggcttctatgctATGGCCCTGtggggtcaaggaaccctggtcac |
| | | | AgtctcctcT |
| Ab-HER- | 6547 | HC CDR3 | WGGDGFYAFAL |
| 101 | | (Kabat) | |
| | 6548 | VH | EVQLVESGGGLVQPGGSLRLSCAASGFNIKDTYIHWVRQAPGKGLEWVAR |
| | | | IYPTNGYTRYADSVKGRFTISADTSKNTAYLQMNSLRAEDTAVYYCSRWG |
| | | | GDGFYAFALWGQGTLVTVSS |
| | 6549 | DNA VH | gaggttcagctggtggagtctggTggtggcctGgtgcagccagggggctc |
| | | | actcAGAttgtcctgtgcagcttctggcttcaacattaaagacacctata |
| | | | tacactgggtgAGAcaggccccIggAaagggcctggaatgggttgcaagg |
| | | | atttatcctacTaatggttatactagatatgcAgatagTgtcaagggcAG |
| | | | AttcactataagTgcagacacatccaaaaacacagcctacctgcagatga |
| | | | acagcctgAGAgctgaggacactgcAgtctattattgttctagatgggga |
| | | | gggGATggcttctatgctTTTGCCCTGtggggtcaaggaaccctggtcac |
| | | | AgtctcctcT |

TABLE 20
Constant Regions of Heavy Chains and Light Chains

| SEQ | | |
|---|---|---|
| ID | | |
| NO | Description | Sequence |
| 5003 | DNA Constant | gcgtcgaccaagggcccatcggtcttccccctggcaccctcctccaagagcacctctg |
| | Region of | ggggcacagcggccctgggctgcctggtcaaggactacttccccgaacctgtgacggt |
| | Heavy Chain | ctcgtggaactcaggcgccctgaccagcggcgtgcacaccttcccggctgtcctacag |
| | (hIgG1) | tcctcaggactctactccctcagcagcgtggtgaccgtgccctccagcagcttgggca |
| | | cccagacctacatctgcaacgtgaatcacaagcccagcaacaccaaggtggacaagaa |
| | | agttgagcccCCCaaatcttgtgacaaaactcacacatgcccaccgtgcccagcacct |
| | | gaactcctggggggaccgtcagtcttcctcttccccccaaaacccaaggacaccctca |
| | | tgatctcccggacccctgaggtcacatgcgtggtggtggacgtgagccacgaagaccc |
| | | tgaggtcaagttcaactggtacgtggacggcgtggaggtgcataatgccaagacaaag |
| | | ccgcgggaggagcagtacaacagcacgtaccgtgtggtcagcgtcctcaccgtcctgc |
| | | accaggactggctgaatggcaaggagtacaagtgcaaggtctccaacaaagccctccc |
| | | agcccccatcgagaaaaccatctccaaagccaaagggcagccccgagaaccacaggtg |
| | | tacaccctgcccccatcccgggatgagctgaccaagaaccaggtcagcctgacctgcc |
| | | tggtcaaaggcttctatcccagcgacatcgccgtggagtgggagagcaatgggcagcc |
| | | ggagaacaactacaagaccacgcctcccgtgctggactccgacggctccttcttcctc |
| | | tacagcaagctcaccgtggacaagagcaggtggcagcaggggaacgtcttctcatgct |
| | | ccgtgatgcatgaggctctgcacaaccactacacgcagaagagcctctccctgtctcc |
| | | gggtaaa |
| 5004 | Constant | ASTKGPSVFPLAPSSKSTSGGTAALGCLVKDYFPEPVTVSWNSGALTSGVHTFPAVLQ |
| | Region of | SSGLYSLSSVVTVPSSSLGTQTYICNVNHKPSNTKVDKKVEPPKSCDKTHTCPPCPAP |
| | Heavy Chain | ELLGGPSVFLFPPKPKDTLMISRTPEVTCVVVDVSHEDPEVKFNWYVDGVEVHNAKTK |
| | (hIgG1) | PREEQYNSTYRVVSVLTVLHQDWLNGKEYKCKVSNKALPAPIEKTISKAKGQPREPQV |
| | | YTLPPSRDELTKNQVSLTCLVKGFYPSDIAVEWESNGQPENNYKTTPPVLDSDGSFFL |
| | | YSKLTVDKSRWQQGNVFSCSVMHEALHNHYTQKSLSLSPGK |
| 5007 | DNA Constant | cgaactgtggctgcaccatctgtcttcatcttcccgccatctgatgagcagttgaaat |
| | Region of Light | ctggaactgcctctgttgtgtgcctgctgaataacttctatcccagagaggccaaagt |
| | Chain (hIgG1 | acagtggaaggtggataacgccctccaatcgggtaactcccaggagagtgtcacagag |
| | kappa) | caggacagcaaggacagcacctacagcctcagcagcaccctgacgctgagcaaagcag |
| | | actacgagaaacacaaagtctacgcctgcgaagtcacccatcagggcctgagctcgcc |
| | | cgtcacaaagagcttcaacaggggagagtgt |
| 5008 | Constant | RTVAAPSVFIFPPSDEQLKSGTASVVCLLNNFYPREAKVQWKVDNALQSGNSQESVTE |
| | Region of Light | QDSKDSTYSLSSTLTLSKADYEKHKVYACEVTHQGLSSPVTKSENRGEC |
| | Chain (hIgG | |
| | Kappa) | |
| 5017 | DNA Constant | gcgtcgaccaagggcccatcggtcttccccctggcaccctcctccaagagcacctctg |
| | Region of | ggggcacagcggccctgggctgcctggtcaaggactacttccccgaacctgtgacggt |
| | Heavy Chain | ctcgtggaactcaggcgccctgaccagcggcgtgcacaccttcccggctgtcctacag |
| | (hIgG1) | tcctcaggactctactccctcagcagcgtggtgaccgtgccctccagcagcttgggca |
| | | cccagacctacatctgcaacgtgaatcacaagcccagcaacaccaaggtggacaagaG |
| | | agttgagcccaaatcttgtgacaaaactcacacatgcccaccgtgcccagcacctgaa |
| | | ctcGtggggggaccgtcagtcttcctcCtccccccaaaacccaaggacaccctcatga |
| | | tctcccggacccctgaggtcacatgcgtggtggtggacgtgagccacgaagaccctga |
| | | ggtcaagttcaactggtacgtggacggcgtggaggtgcataatgccaagacaaagccg |
| | | cCggaggagcagtacaacagcacgCTccgtgtggtcagcgtcctcaccgtcctgcacc |
| | | aggactggctgaatggcaaggagtacaagtgcaaggtctccaacaaagccctcccagc |
| | | ccccatcgagaaaaccatctccaaagccaaagggcagccccgagaaccacaggtgtac |
| | | accctgcccccatcccgggaTgagCtgaccaagaaccaggtcagcctgacctgcctgg |
| | | tcaaaggcttctatcccagcgacatcgccgtggagtgggagagcaatgggcagccgga |
| | | gaacaactacaagaccacgcctcTcgtgctggactccgacggctccttcttcctctac |
| | | agcaagctcaccgtggacaagagcaggtggcagcaggggaacgtcttctcatgctccg |
| | | tgatgcatgaggctctgcacaaccactacacgcagaagagcctctccctgtctccggg |
| | | taaa |
| 5018 | Constant | ASTKGPSVFPLAPSSKSTSGGTAALGCLVKDYFPEPVTVSWNSGALTSGVHTFPAVLQ |
| | Region of | SSGLYSLSSVVTVPSSSLGTQTYICNVNHKPSNTKVDKRVEPKSCDKTHTCPPCPAPE |
| | Heavy Chain | LVGGPSVFLLPPKPKDTLMISRTPEVTCVVVDVSHEDPEVKFNWYVDGVEVHNAKTKP |
| | (hIgG1) | PEEQYNSTLRVVSVLTVLHQDWLNGKEYKCKVSNKALPAPIEKTISKAKGQPREPQVY |
| | | TLPPSRDELTKNQVSLTCLVKGFYPSDIAVEWESNGQPENNYKTTPLVLDSDGSFFLY |
| | | SKLTVDKSRWQQGNVFSCSVMHEALHNHYTQKSLSLSPGK |
| 5021 | DNA Constant | AGAACCGTGGCCGCCCCTAGCGTGTTCATCTTCCCGCCAAGCGACGAGCAGCTGAAGA |
| | Region of Light | GCGGCACCGCCAGCGTGGTGTGCCTGCTGAACAACTTCTACCCCAGAGAGGCCAAGGT |
| | Chain (hIgG1 | GCAGTGGAAGGTGGACAACGCCCTGCAGAGCGGCAACAGCCAGGAGAGCGTGACCGAG |
| | kappa) | CAGGACAGCAAGGACAGCACCTACAGCCTGAGCAGCACCCTGACCCTGAGCAAGGCCG |
| | | ACTACGAGAAGCACAAGGTGTACGCCTGCGAGGTGACCCACCAGGGCCTGAGCAGCCC |
| | | CGTGACCAAGAGCTTCAACAGAGGCGAGTGCt |
| 5022 | Constant | RTVAAPSVFIFPPSDEQLKSGTASVVCLLNNFYPREAKVQWKVDNALQSGNSQESVTE |
| | Region of Light | QDSKDSTYSLSSTLTLSKADYEKHKVYACEVTHQGLSSPVTKSENRGEC |
| | Chain (hIgG | |
| | Kappa) | |
| 5011 | DNA Constant | gcgtcgaccaagggcccatcggtcttccccctggcaccctcctccaagagcacctctg |
| | Region of | ggggcacagcggccctgggctgcctggtcaaggactacttccccgaacctgtgacggt |
| | Heavy Chain | ctcgtggaactcaggcgccctgaccagcggcgtgcacaccttcccggctgtcctacag |
| | (hIgG1) | tcctcaggactctactccctcagcagcgtggtgaccgtgccctccagcagcttgggca |
| | | cccagacctacatctgcaacgtgaatcacaagcccagcaacaccaaggtggacaagaa |
| | | agttgagcccaaatcttgtgacaaaactcacacatgcccaccgtgcccagcacctgaa |
| | | ctcctggggggaccgtcagtcttcctcttccccccaaaacccaaggacaccctcatga |
| | | tctcccggacccctgaggtcacatgcgtggtggtggacgtgagccacgaagaccctga |
| | | ggtcaagttcaactggtacgtggacggcgtggaggtgcataatgccaagacaaagccg |
| | | cgggaggagcagtacaacagcacgtaccgtgtggtcagcgtcctcaccgtcctgcacc |
| | | aggactggctgaatggcaaggagtacaagtgcaaggtctccaacaaagccctcccagc |
| | | ccccatcgagaaaaccatctccaaagccaaagggcagccccgagaaccacaggtgtac |
| | | accctgcccccatcccgggaGgagAtgaccaagaaccaggtcagcctgacctgcctgg |
| | | tcaaaggcttctatcccagcgacatcgccgtggagtgggagagcaatgggcagccgga |
| | | gaacaactacaagaccacgcctcccgtgctggactccgacggctccttcttcctctac |
| | | agcaagctcaccgtggacaagagcaggtggcagcaggggaacgtcttctcatgctccg |
| | | tgatgcatgaggctctgcacaaccactacacgcagaagagcctctccctgtctccggg |
| | | taaa |
| 5012 | Constant | ASTKGPSVFPLAPSSKSTSGGTAALGCLVKDYFPEPVTVSWNSGALTSGVHTFPAVLQ |
| | Region of | SSGLYSLSSVVTVPSSSLGTQTYICNVNHKPSNTKVDKKVEPKSCDKTHTCPPCPAPE |
| | Heavy Chain | LLGGPSVFLFPPKPKDTLMISRTPEVTCVVVDVSHEDPEVKENWYVDGVEVHNAKTKP |
| | (hIgG1) | REEQYNSTYRVVSVLTVLHQDWLNGKEYKCKVSNKALPAPIEKTISKAKGQPREPQVY |
| | | TLPPSREEMTKNQVSLTCLVKGFYPSDIAVEWESNGQPENNYKTTPPVLDSDGSFFLY |
| | | SKLTVDKSRWQQGNVFSCSVMHEALHNHYTQKSLSLSPGK |
| 5025 | DNA Constant | gcgtcgaccaagggcccatcggtcttccccctggcaccctcctccaagagcacctctg |
| | Region of | ggggcacagcggccctgggctgcctggtcaaggactacttccccgaacctgtgacggt |
| | Heavy Chain | ctcgtggaactcaggcgccctgaccagcggcgtgcacaccttcccggctgtcctacag |
| | (hIgG1) | tcctcaggactctactccctcagcagcgtggtgaccgtgccctccagcagcttgggca |
| | | cccagacctacatctgcaacgtgaatcacaagcccagcaacaccaaggtggacaagaa |
| | | agttgagcccCCCaaatcttgtgacaaaactcacacatgcccaccgtgcccagcacct |
| | | gaactcctggggggaccgtcagtcttcctcttccccccaaaacccaaggacaccctca |
| | | tgatctcccggacccctgaggtcacatgcgtggtggtggacgtgagccacgaagaccc |
| | | tgaggtcaagttcaactggtacgtggacggcgtggaggtgcataatgccaagacaaag |
| | | ccgcgggaggagcagtacaacagcacgtaccgtgtggtcagcgtcctcaccgtcctgc |
| | | accaggactggctgaatggcaaggagtacaagtgcaaggtctccaacaaagccctccc |
| | | agcccccatcgagaaaaccatctccaaagccaaagggcagccccgagaaccacaggtg |
| | | tacaccctgcccccatcccgggatgagctgaccaagaaccaggtcagcctgacctgcc |
| | | tggtcaaaggcttctatcccagcgacatcgccgtggagtgggagagcaatgggcagcc |
| | | ggagaacaactacaagaccacgcctcccgtgctggactccgacggctccttcttcctc |
| | | tacagcaagctcaccgtggacaagagcaggtggcagcaggggaacgtcttctcatgct |
| | | ccgtgatgcatgaggctctgcacaacCAGtacacgcagaagagcctctccctgtctcc |
| | | gggtaaa |
| 5026 | Constant | ASTKGPSVFPLAPSSKSTSGGTAALGCLVKDYFPEPVTVSWNSGALTSGVHTFPAVLQ |
| | Region of | SSGLYSLSSVVTVPSSSLGTQTYICNVNHKPSNTKVDKKVEPPKSCDKTHTCPPCPAP |
| | Heavy Chain | ELLGGPSVFLFPPKPKDTLMISRTPEVTCVVVDVSHEDPEVKFNWYVDGVEVHNAKTK |
| | (hIgG1) | PREEQYNSTYRVVSVLTVLHQDWLNGKEYKCKVSNKALPAPIEKTISKAKGQPREPQV |
| | | YTLPPSRDELTKNQVSLTCLVKGFYPSDIAVEWESNGQPENNYKTTPPVLDSDGSFFL |
| | | YSKLTVDKSRWQQGNVFSCSVMHEALHNQYTQKSLSLSPGK |
| 5029 | DNA Constant | gcgtcgaccaagggcccatcggtcttccccctggcaccctcctccaagagcacctctg |
| | Region of | ggggcacagcggccctgggctgcctggtcaaggactacttccccgaacctgtgacggt |
| | Heavy Chain | ctcgtggaactcaggcgccctgaccagcggcgtgcacaccttcccggctgtcctacag |
| | (hIgG1) | tcctcaggactctactccctcagcagcgtggtgaccgtgccctccagcagcttgggca |
| | | cccagacctacatctgcaacgtgaatcacaagcccagcaacaccaaggtggacaagaa |
| | | agttgagcccCCCaaatcttgtgacaaaactcacacatgcccaccgtgcccagcacct |
| | | gaactcctggggggaccgtcagtcttcctcttccccccaaaacccaaggacaccctca |
| | | tgGCAtcccggacccctgaggtcacatgcgtggtggtggacgtgagccacgaagaccc |
| | | tgaggtcaagttcaactggtacgtggacggcgtggaggtgcataatgccaagacaaag |
| | | ccgcgggaggagcagtacaacagcacgtaccgtgtggtcagcgtcctcaccgtcctgG |
| | | CCcaggactggctgaatggcaaggagtacaagtgcaaggtctccaacaaagccctccc |
| | | agcccccatcgagaaaaccatctccaaagccaaagggcagccccgagaaccacaggtg |
| | | tacaccctgcccccatcccgggatgagctgaccaagaaccaggtcagcctgacctgcc |
| | | tggtcaaaggcttctatcccagcgacatcgccgtggagtgggagagcaatgggcagcc |
| | | ggagaacaactacaagaccacgcctcccgtgctggactccgacggctccttcttcctc |
| | | tacagcaagctcaccgtggacaagagcaggtggcagcaggggaacgtcttctcatgct |
| | | ccgtgatgcatgaggctctgcacaacGCTtacacgcagaagagcctctccctgtctcc |
| | | gggtaaa |
| 5030 | Constant | ASTKGPSVFPLAPSSKSTSGGTAALGCLVKDYFPEPVTVSWNSGALTSGVHTFPAVLQ |
| | Region of | SSGLYSLSSVVTVPSSSLGTQTYICNVNHKPSNTKVDKKVEPPKSCDKTHTCPPCPAP |
| | Heavy Chain | ELLGGPSVFLFPPKPKDTLMASRTPEVTCVVVDVSHEDPEVKFNWYVDGVEVHNAKTK |
| | (hIgG1) | PREEQYNSTYRVVSVLTVLAQDWLNGKEYKCKVSNKALPAPIEKTISKAKGQPREPQV |
| | | YTLPPSRDELTKNQVSLTCLVKGFYPSDIAVEWESNGQPENNYKTTPPVLDSDGSFFL |
| | | YSKLTVDKSRWQQGNVFSCSVMHEALHNAYTQKSLSLSPGK |
| 5211 | DNA Constant | gcgtcgaccaagggcccatcggtcttccccctggcaccctcctccaagagcacctctg |
| | Region of | ggggcacagcggccctgggctgcctggtcaaggactacttccccgaacctgtgacggt |
| | Heavy Chain | ctcgtggaactcaggcgccctgaccagcggcgtgcacaccttcccggctgtcctacag |
| | (hIgG1) | tcctcaggactctactccctcagcagcgtggtgaccgtgccctccagcagcttgggca |
| | | cccagacctacatctgcaacgtgaatcacaagcccagcaacaccaaggtggacaagaa |
| | | agttgagcccCCCaaatcttgtgacaaaactcacacatgcccaccgtgcccagcacct |
| | | gaactcctggggggaccgtcagtcttcctcttccccccaaaacccaaggacaccctca |
| | | tgGCAtcccggacccctgaggtcacatgcgtggtggtggacgtgagccacgaagaccc |
| | | tgaggtcaagttcaactggtacgtggacggcgtggaggtgcataatgccaagacaaag |
| | | ccgcgggaggagcagtacaacagcacgtaccgtgtggtcagcgtcctcaccgtcctgG |
| | | CCcaggactggctgaatggcaaggagtacaagtgcaaggtctccaacaaagccctccc |
| | | agcccccatcgagaaaaccatctccaaagccaaagggcagccccgagaaccacaggtg |
| | | tacaccctgcccccatcccgggatgagctgaccaagaaccaggtcagcctgacctgcc |
| | | tggtcaaaggcttctatcccagcgacatcgccgtggagtgggagagcaatgggcagcc |
| | | ggagaacaactacaagaccacgcctcccgtgctggactccgacggctccttcttcctc |
| | | tacagcaagctcaccgtggacaagagcaggtggcagcaggggaacgtcttctcatgct |
| | | ccgtgatgcatgaggctctgcacaaccactacacgcagaagagcctctccctgtctcc |
| | | gggtaaa |
| 5212 | Constant | ASTKGPSVFPLAPSSKSTSGGTAALGCLVKDYFPEPVTVSWNSGALTSGVHTFPAVLQ |
| | Region of | SSGLYSLSSVVTVPSSSLGTQTYICNVNHKPSNTKVDKKVEPPKSCDKTHTCPPCPAP |
| | Heavy Chain | ELLGGPSVFLFPPKPKDTLMASRTPEVTCVVVDVSHEDPEVKENWYVDGVEVHNAKTK |
| | (hIgG1) | PREEQYNSTYRVVSVLTVLAQDWLNGKEYKCKVSNKALPAPIEKTISKAKGQPREPQV |
| | | YTLPPSRDELTKNQVSLTCLVKGFYPSDIAVEWESNGQPENNYKTTPPVLDSDGSFFL |
| | | YSKLTVDKSRWQQGNVFSCSVMHEALHNHYTQKSLSLSPGK |
| 5213 | DNA Constant | gcgtcgaccaagggcccatcggtcttccccctggcaccctcctccaagagcacctctg |
| | Region of | ggggcacagcggccctgggctgcctggtcaaggactacttccccgaacctgtgacggt |
| | Heavy Chain | ctcgtggaactcaggcgccctgaccagcggcgtgcacaccttcccggctgtcctacag |
| | (hIgG1) | tcctcaggactctactccctcagcagcgtggtgaccgtgccctccagcagcttgggca |
| | | cccagacctacatctgcaacgtgaatcacaagcccagcaacaccaaggtggacaagaa |
| | | agttgagcccCCCaaatcttgtgacaaaactcacacatgcccaccgtgcccagcacct |
| | | gaactcctggggggaccgtcagtcttcctcttccccccaaaacccaaggacaccctca |
| | | tgGCAtcccggacccctgaggtcacatgcgtggtggtggacgtgagccacgaagaccc |
| | | tgaggtcaagttcaactggtacgtggacggcgtggaggtgcataatgccaagacaaag |
| | | ccgcgggaggagcagtacaacagcacgtaccgtgtggtcagcgtcctcaccgtcctgc |
| | | accaggactggctgaatggcaaggagtacaagtgcaaggtctccaacaaagccctccc |
| | | agcccccatcgagaaaaccatctccaaagccaaagggcagccccgagaaccacaggtg |
| | | tacaccctgcccccatcccgggatgagctgaccaagaaccaggtcagcctgacctgcc |
| | | tggtcaaaggcttctatcccagcgacatcgccgtggagtgggagagcaatgggcagcc |
| | | ggagaacaactacaagaccacgcctcccgtgctggactccgacggctccttcttcctc |
| | | tacagcaagctcaccgtggacaagagcaggtggcagcaggggaacgtcttctcatgct |
| | | ccgtgatgcatgaggctctgcacaacCAGtacacgcagaagagcctctccctgtctcc |
| | | gggtaaa |
| 5214 | Constant | ASTKGPSVFPLAPSSKSTSGGTAALGCLVKDYFPEPVTVSWNSGALTSGVHTFPAVLQ |
| | Region of | SSGLYSLSSVVTVPSSSLGTQTYICNVNHKPSNTKVDKKVEPPKSCDKTHTCPPCPAP |
| | Heavy Chain | ELLGGPSVFLFPPKPKDTLMASRTPEVTCVVVDVSHEDPEVKFNWYVDGVEVHNAKTK |
| | (hIgG1) | PREEQYNSTYRVVSVLTVLHQDWLNGKEYKCKVSNKALPAPIEKTISKAKGQPREPQV |
| | | YTLPPSRDELTKNQVSLTCLVKGFYPSDIAVEWESNGQPENNYKTTPPVLDSDGSFFL |
| | | YSKLTVDKSRWQQGNVFSCSVMHEALHNQYTQKSLSLSPGK |
| 5215 | DNA Constant | gcCtcTaccaagggcccatcTgtcttccccctggcaccctcctccaagagcacctctg |
| | Region of | ggggcacagcAgccctgggctgcctggtcaaggactacttcccTgaacctgtgacAgt |
| | Heavy Chain | ctcTtggaactcaggGgccctgaccTCTggGgtgcacaccttcccAgctgtcctacag |
| | (hIgG1) | tcctcaggactctactccctcTCTTCTgtggtgacAgtgccctccagcagcttgggca |
| | | cccagacctacatctgcaaTgtgaatcacaagcccagcaacaccaaggtggacaagaa |
| | | agttgagcccCCCaaatcttgtgacaaaactcacacatgcccaccCtgcccagcacct |
| | | gaactcctggggggaccCtcagtcttcctcttccccccaaaacccaaggacaccctca |
| | | tgatctccAGAacccctgaggtcacatgIgtggtggtggaTgtgagccaTgaagaccc |
| | | tgaggtcaagttcaactggtaTgtggaTggGgtggaggtgcataatgccaagacaaag |
| | | ccCAGAgaggagcagtacaacagcacCtacAGAgtggtcTCAgtcctcacTgtcctgc |
| | | accaggactggctgaatggcaaggagtacaagtgcaaggtctccaacaaagccctccc |
| | | agcccccatAgagaaaaccatctccaaagccaaagggcagcccAGAgaaccacaggtg |
| | | tacaccctgcccccatccAGAgatgagctgaccaagaaccaggtcagcctgacctgcc |
| | | tggtcaaaggcttctatcccTCTgacatIgcTgtggagtgggagagcaatgggcagcc |
| | | AgagaacaactacaagaccacCcctccAgtgctggactcTgatggctccttcttcctc |
| | | tacagcaagctcacAgtggacaagagcaggtggcagcaggggaaTgtcttctcatgct |
| | | cTgtgatgcatgaggctctgcacaaccactacacTcagaagagcctctccctgtctcc |
| | | Tggtaaa |
| 5216 | Constant | ASTKGPSVFPLAPSSKSTSGGTAALGCLVKDYFPEPVTVSWNSGALTSGVHTFPAVLQ |
| | Region of | SSGLYSLSSVVTVPSSSLGTQTYICNVNHKPSNTKVDKKVEPPKSCDKTHTCPPCPAP |
| | Heavy Chain | ELLGGPSVFLFPPKPKDTLMISRTPEVTCVVVDVSHEDPEVKFNWYVDGVEVHNAKTK |
| | (hIgG1) | PREEQYNSTYRVVSVLTVLHQDWLNGKEYKCKVSNKALPAPIEKTISKAKGQPREPQV |
| | | YTLPPSRDELTKNQVSLTCLVKGFYPSDIAVEWESNGQPENNYKTTPPVLDSDGSFFL |
| | | YSKLTVDKSRWQQGNVFSCSVMHEALHNHYTQKSLSLSPGK |
| 5217 | DNA Constant | AGGactgtCgctgcaccatctgtcttcatcttcccAccatctgatgagcagttgaaat |
| | Region of Light | ctggaactgcctctgttAAGtgcctgctgaataacttctatcccagagaggccaaagt |
| | Chain | acagtggaaggtggataaTgccctccaaAGTggtaactcccaggagagtgtcacagag |
| | | caggacagcaaggacagcacctacagcctcagcagcaccctgacCctgagcaaagcag |
| | | actaTgagaaacacaaagtctaTgcctgTgaagtcacccatcagggcctgagcAGCcc |
| | | Agtcacaaagagcttcaacaggggagagtgt |
| 5218 | Constant | RTVAAPSVFIFPPSDEQLKSGTASVKCLLNNFYPREAKVQWKVDNALQSGNSQESVTE |
| | Region of Light | QDSKDSTYSLSSTLTLSKADYEKHKVYACEVTHQGLSSPVTKSENRGEC |
| | Chain | |
| 5219 | DNA Constant | gcCtcTaccaagggcccatcTgtcttccccctggcaccctcctccaagagcacctctg |
| | Region of | ggggcacagcTgccctgggctgcctggtcaaggactacttcccTgaacctgtgacAgt |
| | Heavy Chain | ctcCtggaactcaggAgccctgaccagTggAgtgcacaccttcccTgctgtcctacag |
| | (hIgG1) | tcctcaggactctactccctcagcTCTgtggtgacAgtgccctccagcagcttgggca |
| | | cccagacctacatctgcaaTgtgaatcacaagcccagcaacaccaaggtggacaagaG |
| | | agttgagcccaaatcttgtgacaaaactcacacatgcccaccTtgcccagcacctgaa |
| | | ctGGtggggggaccAtcagtcttcctcCtccccccaaaacccaaggacaccctcatga |
| | | tctccAGAacccctgaggtcacatgTgtggtggtggaTgtgagccaTgaagaccctga |
| | | ggtcaagttcaactggtaTgtggaTggAgtggaggtgcataatgccaagacaaagccC |
| | | cCTgaggagcagtacaacagcacTCTcAGAgtggtcTCTgtcctcacAgtcctgcacc |
| | | aggactggctgaatggcaaggagtacaagtgcaaggtctccaacaaagccctcccagc |
| | | ccccatTgagaaaaccatctccaaagccaaagggcagcccAGAgaaccacaggtgtac |
| | | accctgcccccatccAGAgaTgagCtgaccaagaaccaggtcagcctgacctgcctgg |
| | | tcaaaggcttctatcccTCTgacatTgcTgtggagtgggagagcaatgggcagccTga |
| | | gaacaactacaagaccacAcctcTTgtgctggactcTgaTggctccttcttcctctac |
| | | agcaagctcacAgtggacaagagcaggtggcagcaggggaaTgtcttctcatgcTCTg |
| | | tgatgcatgaggctctgcacaaccactacacCcagaagagcctctccctgtctccAgg |
| | | taaa |
| 5247 | DNA Constant | gcCtcTaccaagggcccatcTgtcttccccctggcaccctcctccaagagcacctctg |
| | Region of | ggggcacagcTgccctgggctgcctggtcaaggactacttcccTgaacctgtgacAgt |
| | Heavy Chain | ctcCtggaactcaggAgccctgaccagTggAgtgcacaccttcccTgctgtcctacag |
| | (hIgG1) | tcctcaggactctactccctcagcTCTgtggtgacAgtgccctccagcagcttgggca |
| | | cccagacctacatctgcaaTgtgaatcacaagcccagcaacaccaaggtggacaagaG |
| | | agttgagcccaaatcttgtgacaaaactcacacatgcccaccTtgcccagcacctgaa |
| | | ctGGtggggggaccAtcagtcttcctcCtccccccaaaacccaaggacaccctcatga |
| | | tctccAGAacccctgaggtcacatgTgtggtggtggaTgtgagccaTgaagaccctga |
| | | ggtcaagttcaactggtaTgtggaTggAgtggaggtgcataatgccaagacaaagccC |
| | | cCTgaggagcagtacaacagcacTCTcAGAgtggtcTCTgtcctcacAgtcctgcacc |
| | | aggactggctgaatggcaaggagtacaagtgcaaggtctccaacaaagccctcccagc |
| | | ccccatTgagaaaaccatctccaaagccaaagggcagcccAGAgaaccacaggtgtac |
| | | accctgcccccatccAGAgaTgagCtgaccaagaaccaggtcagcctgacctgcctgg |
| | | tcaaaggcttctatcccTCTgacatTgcTgtggagtgggagagcaatgggcagccTga |
| | | gaacaactacaagaccacAcctcTTgtgctggactcTgaTggctccttcttcctctac |
| | | agcaagctcacAgtggacaagagcagAtggcagcaggggaaTgtcttctcatgcTCTg |
| | | tgatgcatgaggctctgcacaaccactacacCcagaagagcctctccctgtctccAgg |
| | | taaa |
| 5220 | Constant | ASTKGPSVFPLAPSSKSTSGGTAALGCLVKDYFPEPVTVSWNSGALTSGVHTFPAVLQ |
| | Region of | SSGLYSLSSVVTVPSSSLGTQTYICNVNHKPSNTKVDKRVEPKSCDKTHTCPPCPAPE |
| | Heavy Chain | LVGGPSVFLLPPKPKDTLMISRTPEVTCVVVDVSHEDPEVKFNWYVDGVEVHNAKTKP |
| | (hIgG1) | PEEQYNSTLRVVSVLTVLHQDWLNGKEYKCKVSNKALPAPIEKTISKAKGQPREPQVY |
| | | TLPPSRDELTKNQVSLTCLVKGFYPSDIAVEWESNGQPENNYKTTPLVLDSDGSFFLY |
| | | SKLTVDKSRWQQGNVFSCSVMHEALHNHYTQKSLSLSPGK |
| 7591 | DNA Constant | gcCtcTaccaagggcccatcTgtcttccccctggcaccctcctccaagagcacctctg |
| | Region of | ggggcacagcTgccctgggctgcctggtcaaggactacttcccTgaacctgtgacAgt |
| | Heavy Chain | ctcCtggaactcaggAgccctgaccagTggAgtgcacaccttcccTgctgtcctacag |
| | (hIgG1) | tcctcaggactctactccctcagcTCTgtggtgacAgtgccctccagcagcttgggca |
| | | cccagacctacatctgcaaTgtgaatcacaagcccagcaacaccaaggtggacaagaG |
| | | agttgagcccaaatcttgtgacaaaactcacacatgcccaccTtgcccagcacctgaa |
| | | ctGGtggggggaccAtcagtcttcctcCtccccccaaaacccaaggacaccctcatgG |
| | | CAtccAGAacccctgaggtcacatgIgtggtggtggaTgtgagccaTgaagaccctga |
| | | ggtcaagttcaactggtaTgtggaTggAgtggaggtgcataatgccaagacaaagccC |
| | | cCTgaggagcagtacaacagcacTCTcAGAgtggtcTCTgtcctcacAgtcctgGCCc |
| | | aggactggctgaatggcaaggagtacaagtgcaaggtctccaacaaagccctcccagc |
| | | ccccatTgagaaaaccatctccaaagccaaagggcagcccAGAgaaccacaggtgtac |
| | | accctgcccccatccAGAgaTgagCtgaccaagaaccaggtcagcctgacctgcctgg |
| | | tcaaaggcttctatcccTCTgacatIgcTgtggagtgggagagcaatgggcagccTga |
| | | gaacaactacaagaccacAcctcTTgtgctggactcTgaTggctccttcttcctctac |
| | | agcaagctcacAgtggacaagagcagAtggcagcaggggaaTgtcttctcatgcTCTg |
| | | tgatgcatgaggctctgcacaacGCTtacacCcagaagagcctctccctgtctccAgg |
| | | taaa |
| 7592 | Constant | ASTKGPSVFPLAPSSKSTSGGTAALGCLVKDYFPEPVTVSWNSGALTSGVHTFPAVLQ |
| | Region of | SSGLYSLSSVVTVPSSSLGTQTYICNVNHKPSNTKVDKRVEPKSCDKTHTCPPCPAPE |
| | Heavy Chain | LVGGPSVFLLPPKPKDTLMASRTPEVTCVVVDVSHEDPEVKFNWYVDGVEVHNAKTKP |
| | (hIgG1) | PEEQYNSTLRVVSVLTVLAQDWLNGKEYKCKVSNKALPAPIEKTISKAKGQPREPQVY |
| | | TLPPSRDELTKNQVSLTCLVKGFYPSDIAVEWESNGQPENNYKTTPLVLDSDGSFFLY |
| | | SKLTVDKSRWQQGNVFSCSVMHEALHNAYTQKSLSLSPGK |
| 5221 | DNA Constant | AGAactgtggctgcaccatctgtcttcatcttcccAccatctgatgagcagttgaaat |
| | Region of Light | ctggaactgcctctgttgtgtgcctgctgaataacttctatcccagagaggccaaagt |
| | Chain | acagtggaaggtggataaTgccctccaatcAggtaactcccaggagagtgtcacagag |
| | | caggacagcaaggacagcacctacagcctcagcagcaccctgacTctgagcaaagcag |
| | | actaTgagaaacacaaagtctaTgcctgTgaagtcacccatcagggcctgagctcTcc |
| | | Tgtcacaaagagcttcaacaggggagagtgt |
| 5222 | Constant | RTVAAPSVFIFPPSDEQLKSGTASVVCLLNNFYPREAKVQWKVDNALQSGNSQESVTE |
| | Region of Light | QDSKDSTYSLSSTLTLSKADYEKHKVYACEVTHQGLSSPVTKSENRGEC |
| | Chain | |
| 5277 | DNA Constant | gagcccaaatcttgtgacaaaactTACacatgcccaccgtgcccagcacctgaactcG |
| | Region of | tggggggaccgtcagtcttcctcCtccccccaaaacccaaggacaccctcatgatctc |
| | Heavy Chain | ccggacccctgaggtcacatgcgtggtggtggacgtgagccacgaagaccctgaggtc |
| | (hIgG1) | aagttcaactggtacgtggacggcgtggaggtgcataatgccaagacaaagccgcCgg |
| | | aggagcagtacaacagcacgCTccgtgtggtcagcgtcctcaccgtcctgcaccagga |
| | | ctggctgaatggcaaggagtacaagtgcaaggtctccaacaaagccctcccagccccc |
| | | atcgagaaaaccatctccaaagccaaagggcagccccgagaaccacaggtgtacaccc |
| | | tgcccccatcccgggaTgagCtgaccaagaaccaggtcagcctgacctgcctggtcaa |
| | | aggcttctatcccagcgacatcgccgtggagtgggagagcaatgggcagccggagaac |
| | | aactacaagaccacgcctcTcgtgctggactccgacggctccttcttcctctacagca |
| | | agctcaccgtggacaagagcaggtggcagcaggggaacgtcttctcatgctccgtgat |
| | | gcatgaggctctgcacaaccactacacgcagaagagcctctccctgtctccgggtaaa |
| 5278 | Constant | EPKSCDKTYTCPPCPAPELVGGPSVFLLPPKPKDTLMISRTPEVTCVVVDVSHEDPEV |
| | Region of | KFNWYVDGVEVHNAKTKPPEEQYNSTLRVVSVLTVLHQDWLNGKEYKCKVSNKALPAP |
| | Heavy Chain | IEKTISKAKGQPREPQVYTLPPSRDELTKNQVSLTCLVKGFYPSDIAVEWESNGQPEN |
| | | NYKTTPLVLDSDGSFFLYSKLTVDKSRWQQGNVFSCSVMHEALHNHYTQKSLSLSPGK |
| 5279 | DNA Constant | gagcccaaatcttgtgacaaaactTACacatgcccaccgtgcccagcacctgaactcG |
| | Region of | tggggggaccgtcagtcttcctcCtccccccaaaacccaaggacaccctcatgatctc |
| | Heavy Chain | ccggacccctgaggtcacatgcgtggtggtggacgtgagccacgaagaccctgaggtc |
| | (hIgG1) | aagttcaactggtacgtggacggcgtggaggtgcataatgccaagacaaagccgcCgg |
| | | aggagcagtacaacagcacgCTccgtgtggtcagcgtcctcaccgtcctgcaccagga |
| | | ctggctgaatggcaaggagtacaagtgcaaggtctccaacaaagccctcccagccccc |
| | | atcgagaaaaccatctccaaagccaaagggcagccccgagaaccacaggtgtacaccc |
| | | tgcccccatcccgggaTgagCtgaccaagaaccaggtcagcctgacctgcctggtcaa |
| | | aggcttctatcccagcgacatcgccgtggagtgggagagcaatgggcagccggagaac |
| | | aactacaagaccacgcctcTcgtgctggactccgacggctccttcttcctctacagca |
| | | agctcaccgtggacaagagcaggtggcagcaggggaacgtcttctcatgctccgtgat |
| | | gcatgaggctctgcacaaccactacacgcagaagagcctctccctgtctccgggtaaa |
| 5280 | Constant | EPKSCDKTYTCPPCPAPELVGGPSVFLLPPKPKDTLMISRTPEVTCVVVDVSHEDPEV |
| | Region of | KFNWYVDGVEVHNAKTKPPEEQYNSTLRVVSVLTVLHQDWLNGKEYKCKVSNKALPAP |
| | Heavy Chain | IEKTISKAKGQPREPQVYTLPPSRDELTKNQVSLTCLVKGFYPSDIAVEWESNGQPEN |
| | | NYKTTPLVLDSDGSFFLYSKLTVDKSRWQQGNVFSCSVMHEALHNHYTQKSLSLSPGK |
| 5344 | DNA Constant | GCGTCGACCAAGGGGCCCTCGGTCTTCCCCCTGGCACCCTCCTCCAAGAGCACCTCTG |
| | Region of | GGGGCACAGCGGCCCTGGGCTGCCTGGTCAAGGACTACTTCCCCGAACCGGTGACGGT |
| | Heavy Chain | GTCGTGGAACTCAGGCGCCCTGACCAGCGGCGTGCACACCTTCCCGGCTGTCCTACAG |
| | | TCCTCAGGACTCTACTCCCTCAGCAGCGTGGTGACCGTGCCCTCCAGCAGCTTGGGCA |
| | | CCCAGACCTACATCTGCAACGTGAATCACAAGCCCAGCAACACCAAGGTGGACAAGAA |
| | | AGTTGAGCCCAAATCTTGTGACAAAACTCACACATGCCCACCGTGCCCAGCACCTGAA |
| | | CTCCTGGGGGGACCGTCAGTCTTCCTCTTCCCCCCAAAACCCAAGGACACCCTCATGA |
| | | TCTCCCGGACCCCTGAGGTCACATGCGTGGTGGTGGACGTGAGCCACGAAGACCCTGA |
| | | GGTCAAGTTCAACTGGTACGTGGACGGCGTGGAGGTGCATAATGCCAAGACAAAGCCG |
| | | CGGGAGGAGCAGTACAACAGCACGTACCGTGTGGTCAGCGTCCTCACCGTCCTGCACC |
| | | AGGACTGGCTGAATGGCAAGGAGTACAAGTGCAAGGTCTCCAACAAAGCCCTCCCAGC |
| | | CCCCATCGAGAAAACCATCTCCAAAGCCAAAGGGCAGCCCCGAGAACCACAGGTGTAC |
| | | ACCCTGCCCCCATCCCGGGATGAGCTGACCAAGAACCAGGTCAGCCTGACCTGCCTGG |
| | | TCAAAGGCTTCTATCCCAGCGACATCGCCGTGGAGTGGGAGAGCAATGGGCAGCCGGA |
| | | GAACAACTACAAGACCACGCCTCCCGTGCTGGACTCCGACGGCTCCTTCTTCCTCTAC |
| | | AGCAAGCTCACCGTGGACAAGAGCAGGTGGCAGCAGGGGAACGTCTTCTCATGCTCCG |
| | | TGATGCATGAGGCTCTGCACAACCACTACACGCAGAAGAGCCTCTCCCTGTCTCCCGG |
| | | CAAG |
| 5345 | Constant | ASTKGPSVFPLAPSSKSTSGGTAALGCLVKDYFPEPVTVSWNSGALTSGVHTFPAVLQ |
| | Region of | SSGLYSLSSVVTVPSSSLGTQTYICNVNHKPSNTKVDKKVEPKSCDKTHTCPPCPAPE |
| | Heavy Chain | LLGGPSVFLFPPKPKDTLMISRTPEVTCVVVDVSHEDPEVKFNWYVDGVEVHNAKTKP |
| | | REEQYNSTYRVVSVLTVLHQDWLNGKEYKCKVSNKALPAPIEKTISKAKGQPREPQVY |
| | | TLPPSRDELTKNQVSLTCLVKGFYPSDIAVEWESNGQPENNYKTTPPVLDSDGSFFLY |
| | | SKLTVDKSRWQQGNVFSCSVMHEALHNHYTQKSLSLSPGK |
| 5346 | DNA Constant | CGTACGGTGGCTGCACCATCTGTCTTCATCTTCCCGCCATCTGATGAGCAGTTGAAAT |
| | Region of Light | CTGGAACTGCCTCTGTTGTGTGCCTGCTGAATAACTTCTACCCCAGAGAAGCCAAAGT |
| | Chain | GCAGTGGAAGGTGGACAACGCCCTGCAGAGCGGAAACAGCCAGGAAAGCGTGACAGAG |
| | | CAGGATTCCAAGGATTCCACATACAGCCTGAGCAGCACACTGACACTGTCCAAGGCCG |
| | | ACTACGAGAAGCACAAGGTGTACGCCTGCGAAGTGACACACCAGGGACTGTCCTCCCC |
| | | TGTGACAAAGAGCTTCAACAGAGGAGAATGC |

### Payload Component: SH3-Derived Binding Polypeptide

[1120] In some embodiments, the nucleic acid encoding the payload, e.g., antibody molecule, comprises a nucleotide sequence encoding a Fyn SH3-derived binding polypeptide (e.g., a Fynomer sequence or Fynomer sequence region herein). Fynomers are small T-kDa globular proteins derived from the SH3 domain of the human Fyn kinase (Fyn SH3) that can be engineered to bind with antibody-like affinity and specificity to a target of choice through mutation of two loops (RT- and src-loop) on the surface of the Fyn SH3 domain (Brack et al. (2014), Mol Cancer Ther 13(8):2030-2039). Fynomers may be used to generate multispecific FynomAbs, which are obtained by fusion of Fynomers to any of the four antibody light- or heavy-chain termini. Id.

[1121] In some embodiments, the nucleic acid encoding the payload, e.g., antibody molecule, comprises a C12 Fynomer region. The HER2-specific Fynomer C12 is a 63-amino acid polypeptide that targets an epitope in domain I of HER2. In some embodiments, the Fynomer sequence encodes the fusion of Fynomer C12 to an antibody C- or N-termini heavy or light chain. In one embodiment the nucleotide sequence encodes the fusion of Fynomer C12 to the N-terminus of the light chain of an antibody. In another embodiment, the nucleotide sequence encodes the fusion of C12 to the N-terminus of the light chain of an antibody. The anti-proliferative activity of anti-HER2 Fynomer-antibody fusions varies depending on the relative orientation of the Fynomer and the binding site of the antibody.

[1122] In some embodiments, the encoded C12 Fynomer comprises the amino acid sequence of SEQ ID NO: 5156, or an amino acid sequence with at least 70%, 75%, 80%, 85%, 90%, 95%, or 99% sequence identity thereto. In some embodiments, the nucleotide sequence encoding the C12 Fynomer comprises the nucleotide sequence of SEQ ID NO: 5155, or a nucleotide sequence with at least 70%, 75%, 80%, 85%, 90%, 95%, or 99% sequence identity thereto. In some embodiments, the Fynomer region comprises about 100-200 nucleotides in length, e.g., about 110-200 nucleotides, about 120-200 nucleotides, about 130-200 nucleotides, about 140-200 nucleotides, about 150-200 nucleotides, about 160-200 nucleotides, about 170-200 nucleotides, about 170-200 nucleotides, about 180-200 nucleotides, about 185-200 nucleotides, about 180-190 nucleotides, or about 185-190 nucleotides. In some embodiments, the Fynomer region comprises about 180 nucleotides to about 200 nucleotides in length, e.g., about 189 nucleotides.

### Payload Component: Linkers

[1123] In some embodiments, the nucleic acid encoding the payload, e.g., antibody molecule, comprises a nucleotide sequence encoding a linker. In some embodiments, the nucleic acid encoding the payload encodes two or more linkers. In some embodiments, the encoded linker comprises a linker provided in Table 41. In some embodiments, the encoded linker comprises an amino acid sequence encoded by any one of the nucleotide sequences provided in Table 41, or an amino acid sequence with at least 70%, 75%, 80%, 85%, 90%, 95%, or 99% sequence identity thereto. In some embodiments, the nucleotide sequence encoding the linker comprises any one of the nucleotide sequences provided in Table 41, or a nucleotide sequence with at least 70%, 75%, 80%, 85%, 90%, 95%, or 99% sequence identity thereto.

TABLE 41
Linkers

| Linker | | | SEQ | |
|---|---|---|---|---|
| ID | Description | Length | ID NO | Sequence |
| Linker1 | Furin | 12 | 1724 | AGAAAGAGGCGA |
| Linker2 | Furin | 12 | 1725 | CGGGCCAAGCGG |
| | Furin | 12 | 6557 | AGAAAGAGGAGA |
| Linker3 | T2A | 54 | 1726 | GAGGGCAGAGGAAGTCTTCTAACATGCGGTGACGTGGAGG |
| | | | | AGAATCCCGGCCCT |
| | T2A | 54 | 6558 | GAGGGCAGAGGAAGTCTTCTAACATGTGGTGATGTGGAGG |
| | | | | AGAATCCTGGCCCT |
| Linker4 | F2A | 75 | 1727 | GGAAGCGGAGTGAAACAGACTTTGAATTTTGACCTTCTCA |
| | | | | AGTTGGCGGGAGACGTGGAGTCCAACCCTGGACCT |
| Linker5 | P2A | 66 | 1728 | GGAAGCGGAGCTACTAACTTCAGCCTGCTGAAGCAGGCTG |
| | | | | GAGACGTGGAGGAGAACCCTGGACCT |
| Linker6 | SG4S (SEQ | 18 | 1729 | TCCGGAGGCGGCGGCAGC |
| | ID NO: 4536) | | | |
| Linker7 | (G4S)3 (SEQ | 45 | 1730 | GGTGGTGGTGGTAGCGGCGGCGGCGGCTCTGGTGGTGGTG |
| | ID NO: 4537) | | | GATCC |
| Linker8 | (G4S)5 (SEQ | 75 | 1731 | GGCGGAGGTGGCTCCGGAGGCGGAGGCAGCGGCGGAGGTG |
| | ID NO: 4538) | | | GGTCTGGCGGAGGCGGGTGCGGCGGAGGTGGCTCC |
| Linker9 | IRES | 609 | 1732 | AATTCCGCCCCTCTCCCCCCCCCCCCTCTCCCTCCCCCCC |
| | | | | CCCTAACGTTACTGGCCGAAGCCGCTTGGAATAAGGCCGG |
| | | | | TGTGCGTTTGTCTATATGTTATTTTCCACCATATTGCCGT |
| | | | | CTTTTGGCAATGTGAGGGCCCGGAAACCTGGCCCTGTCTT |
| | | | | CTTGACGAGCATTCCTAGGGGTCTTTCCCCTCTCGCCAAA |
| | | | | GGAATGCAAGGTCTGTTGAATGTCGTGAAGGAAGCAGTTC |
| | | | | CTCTGGAAGCTTCTTGAAGACAAACAACGTCTGTAGCGAC |
| | | | | CCTTTGCAGGCAGCGGAACCCCCCACCTGGCGACAGGTGC |
| | | | | CTCTGCGGCCAAAAGCCACGTGTATAAGATACACCTGCAA |
| | | | | AGGCGGCACAACCCCAGTGCCACGTTGTGAGTTGGATAGT |
| | | | | TGTGGAAAGAGTCAAATGGCTCTCCTCAAGCGTATTCAAC |
| | | | | AAGGGGCTGAAGGATGCCCAGAAGGTACCCCATTGTATGG |
| | | | | GATCTGATCTGGGGCCTCGGTGCACATGCTTTACATGTGT |
| | | | | TTAGTCGAGGTTAAAAAAACGTCTAGGCCCCCCGAACCAC |
| | | | | GGGGACGTGGTTTTCCTTTGAAAAACACGATGATAATATG |
| | | | | GCCACAACC |
| Linker10 | IRES-2 | 623 | 1733 | TAACGAATTCCGCCCCTCTCCCCCCCCCCCCTCTCCCTCC |
| | | | | CCCCCCCCTAACGTTACTGGCCGAAGCCGCTTGGAATAAG |
| | | | | GCCGGTGTGCGTTTGTCTATATGTTATTTTCCACCATATT |
| | | | | GCCGTCTTTTGGCAATGTGAGGGCCCGGAAACCTGGCCCT |
| | | | | GTCTTCTTGACGAGCATTCCTAGGGGTCTTTCCCCTCTCG |
| | | | | CCAAAGGAATGCAAGGTCTGTTGAATGTCGTGAAGGAAGC |
| | | | | AGTTCCTCTGGAAGCTTCTTGAAGACAAACAACGTCTGTA |
| | | | | GCGACCCTTTGCAGGCAGCGGAACCCCCCACCTGGCGACA |
| | | | | GGTGCCTCTGCGGCCAAAAGCCACGTGTATAAGATACACC |
| | | | | TGCAAAGGCGGCACAACCCCAGTGCCACGTTGTGAGTTGG |
| | | | | ATAGTTGTGGAAAGAGTCAAATGGCTCTCCTCAAGCGTAT |
| | | | | TCAACAAGGGGCTGAAGGATGCCCAGAAGGTACCCCATTG |
| | | | | TATGGGATCTGATCTGGGGCCTCGGTGCACATGCTTTACA |
| | | | | TGTGTTTAGTCGAGGTTAAAAAAACGTCTAGGCCCCCCGA |
| | | | | ACCACGGGGACGTGGTTTTCCTTTGAAAAACACGATGATA |
| | | | | ATATGGCCACAACCGCCGCCACC |
| Linker11 | hIgG2 hinge | 54 | 1734 | GTGGAGAGGAAGTGCTGCGTGGAGTGCCCACCATGCCCTG |
| | | | | CCCCTCCTGTGGCC |
| Linker12 | hIgG3 hinge | 108 | 1735 | GAGCTCAAAACCCCACTTGGTGACACAACTCACACATGCC |
| | | | | CACGGTGCCCAGAGCCCAAATCTTGTGACACACCTCCCCC |
| | | | | GTGCCCACGGTGCCCAGCACCTGAACTC |
| Linker13 | hIgG3-2 | 153 | 1736 | GAGCTCAAAACCCCACTTGGTGACACAACTCACACATGCC |
| | hinge | | | CACGGTGCCCAGAGCCCAAATCTTGTGACACACCTCCCCC |
| | | | | GTGCCCACGGTGCCCAGAGCCCAAATCTTGTGACACACCT |
| | | | | CCCCCATGCCCACGGTGCCCAGCACCTGAACTC |
| Linker14 | hIgG3-3 | 198 | 1737 | GAGCTCAAAACCCCACTTGGTGACACAACTCACACATGCC |
| | hinge | | | CACGGTGCCCAGAGCCCAAATCTTGTGACACACCTCCCCC |
| | | | | GTGCCCACGGTGCCCAGAGCCCAAATCTTGTGACACACCT |
| | | | | CCCCCATGCCCACGGTGCCCAGAGCCCAAATCTTGTGACA |
| | | | | CACCTCCCCCGTGCCCAAGGTGCCCAGCACCTGAACTC |
| Linker15 | msiGG-1 | 45 | 1738 | GTGCCCAGGGATTGTGGTTGTAAGCCTTGCATATGTACAG |
| | hinge | | | TCCCA |
| Linker16 | msiGG1 | 18 | 1739 | GTGCCCAGGGATTGTGGT |
| | hingc | | | |
| Linker17 | HigG3 hinge | 198 | 6596 | GAGCTCAAAACCCCACTTGGTGACACAACTCACACATGCC |
| | | | | CACGGTGCCCAGAGCCCAAATCTTGTGACACACCTCCCCC |
| | | | | GTGCCCACGGTGCCCAGAGCCCAAATCTTGTGACACAACT |
| | | | | CACACATGCCCACGGTGCCCAGAGCCCAAATCTTGTGACA |
| | | | | CACCTCCCCCGTGCCCAAGGTGCCCAGCACCTGAACTC |
| Linker18 | G4S (SEQ ID | 15 | 6597 | GGTGGTGGTGGATCC |
| | NO: 4535) | | | |
| Linker19 | (G4S)2 (SEQ | 30 | 6598 | GGTGGTGGTGGATCCGGTGGTGGTGGATCC |
| | ID NO: 4539) | | | |
| Linker20 | (G4S)3 (SEQ | 45 | 6599 | GGTGGTGGTGGATCCGGTGGTGGTGGATCCGGTGGTGGTG |
| | ID NO: 4537) | | | GATCC |
| Linker21 | (G4S)4 (SEQ | 60 | 6600 | GGTGGTGGTGGATCCGGTGGTGGTGGATCCGGTGGTGGTG |
| | ID NO: 4540) | | | GATCCGGTGGTGGTGGATCC |
| Linker22 | (G4S)5 (SEQ | 75 | 6601 | GGTGGTGGTGGTAGCGGCGGCGGCGGCTCTGGTGGTGGTG |
| | ID NO: 4538) | | | GATCCGGTGGTGGTGGATCCGGTGGTGGTGGATCC |
| Linker23 | (G4S)5 (SEQ | 75 | 6602 | GGTGGTGGTGGATCCGGTGGTGGTGGATCCGGTGGTGGTG |
| | ID NO: 4538) | | | GATCCGGTGGTGGTGGATCCGGTGGTGGTGGATCC |
| Linker24 | (G4S)6 (SEQ | 90 | 6603 | GGTGGTGGTGGTAGCGGCGGCGGCGGCTCTGGTGGTGGTG |
| | ID NO: 4541) | | | GATCCGGTGGTGGTGGATCCGGTGGTGGTGGATCCGGTGG |
| | | | | TGGTGGATCC |
| Linker25 | (G4S)8 (SEQ | 120 | 6604 | GGTGGTGGTGGTAGCGGCGGCGGCGGCTCTGGTGGTGGTG |
| | ID NO: 4542) | | | GATCCGGTGGTGGTGGATCCGGTGGTGGTGGATCCGGTGG |
| | | | | TGGTGGATCCGGTGGTGGTGGATCCGGTGGTGGTGGATCC |
| Linker26 | (G4S)8 (SEQ | 120 | 6605 | GGTGGTGGTGGATCCGGTGGTGGTGGATCCGGTGGTGGTG |
| | ID NO: 4542) | | | GATCCGGTGGTGGTGGATCCGGTGGTGGTGGATCCGGTGG |
| | | | | TGGTGGATCCGGTGGTGGTGGATCCGGTGGTGGTGGATCC |
| Linker27 | (G4S)4 (SEQ | 60 | 6606 | GGTGGTGGTGGTAGCGGCGGCGGCGGCTCTGGTGGTGGTG |
| | ID NO: 4540) | | | GATCCGGTGGTGGTGGATCC |
| Linker28 | (G4S)6 (SEQ | 90 | 6610 | GGTGGTGGTGGATCCGGTGGTGGTGGATCCGGTGGTGGTG |
| | ID NO: 4541) | | | GATCCGGTGGTGGTGGATCCGGTGGTGGTGGATCCGGTGG |
| | | | | TGGTGGATCC |
| Linker | G4S (SEQ ID | 15 | 5161 | GGAGGAGGAGGAAGT |
| 29 | NO: 4535) | | | |
| Linker | G4S (SEQ ID | 15 | 5162 | GGAGGTGGAGGTTCT |
| 30 | NO: 4535) | | | |
| Linker | GS | 6 | | GGCTCT |
| 31 | | | | |
| Linker | (G4S)3 (SEQ | 45 | 5347 | GGTGGTGGTGGATCCGGAGGAGGAGGAAGTGGAGGTGGAG |
| 32 | ID NO: 4537) | | | GTTCT |
| (DNA) | | | | |
| Linker | (G4S)3 (SEQ | 15 | 5348 | GGGGSGGGGSGGGGS |
| 33 | ID NO: 4537) | | | |
| (amino | | | | |
| acid) | | | | |

[1124] In some embodiments, exemplary linker sequences of any of the construes described herein include Linker 29 (SEQ ID NO: 5161); Linker 30 (SEQ ID NO: 5162); Linker 31 (GGCTCT); Linker 32 (DNA; SEQ ID NO: 5347); Linker 32 (amino acid; SEQ ID NO: 5348).

[1125] In some embodiments, any of the antibody molecules described herein can have a linker. e.g., a flexible polypeptide linker, of varying lengths, connecting the variable domains (e.g., the VH and the VL) of the antigen binding domain of the antibody molecule. For example, a (Gly4-Ser)n linker, wherein n is 0, 1, 2, 3, 4, 5, 6, 7, or 8 (SEQ ID NO: 7587) can be used (e.g., any one of SEQ ID NOs: 1730-1731, 6597-6606, 6610, 5161-5162, 5347, or 5348). In some embodiments, the antibody molecule binds to HER2.

[1126] In some embodiments, the encoded linker comprises an enzymatic cleavage site, e.g., for intracellular and/or extracellular cleavage. In some embodiments, the linker is cleaved to separate the VH and the VL of the antigen binding domain and/or the heavy chain and light chain of the antibody molecule (e.g., an anti-HER2 antibody molecule). In some embodiments, the encoded linker comprises a furin linker or a functional variant. In some embodiments, the nucleotide sequence encoding the furin linker comprises the nucleotide sequence of SEQ ID NO: 1724, or a nucleotide sequence with at least 70%, 75%, 80%, 85%, 90%, 95%, or 99% sequence identity thereto. In some embodiments, furin cleaves proteins downstream of a basic amino acid target sequence (e.g., Arg-X-(Arg/Lys)-Arg) (e.g., as described in Thomas, G., 2002. Nature Reviews Molecular Cell Biology 3(10): 753-66; the contents of which are herein incorporated by reference in its entirety). In some embodiments, the encoded linker comprises a 2A self-cleaving peptide (e.g., a 2A peptide derived from foot-and-mouth disease virus (F2A), porcine teschovirus-1 (P2A), Thoseaasigna virus (T2A), or equine rhinitis A virus (E2A)). In some embodiments, the encoded linker comprises a T2A self-cleaving peptide linker. In some embodiments, the nucleotide sequence encoding the T2A linker comprises the nucleotide sequence of SEQ ID NO: 1726, or a nucleotide sequence with at least 70%, 75%, 80%, 85%, 90%, 95%, or 99% sequence identity thereto. In some embodiments, the nucleic acid encoding the payload encodes a furin linker and a T2A linker.

[1127] In some embodiments, the encoded linkers comprises a cathepsin, a matrix metalloproteinases or a legumain cleavage sites, such as those described e.g. by Cizeau and Macdonald in International Publication No. WO2008052322, the contents of which are herein incorporated in their entirety.

[1128] In some embodiments, the encoded linker comprises an internal ribosomal entry site (IRES) is a nucleotide sequence (>500 nucleotides) for initiation of translation in the middle of a nucleotide sequence, e.g., an mRNA sequence (Kim, J. H. et al., 2011. PLoS One 6(4): e18556; the contents of which are herein incorporated by reference in its entirety), which can be used, for example, to modulate expression of one or more transgenes. In some embodiments, the encode linker comprises a small and unbranched serine-rich peptide linker, such as those described by Huston et al. in U.S. Pat. No. 5,525,491, the contents of which are herein incorporated in their entirety. In some embodiments, polypeptides comprising a serine-rich linker has increased solubility. In some embodiments, the encoded linker comprises an artificial linker, such as those described by Whitlow and Filpula in U.S. Pat. No. 5,856,456 and Ladner et al. in U.S. Pat. No. 4,946,778, the contents of each of which are herein incorporated by their entirety.

### Payload Component: Signal Sequences

[1129] In some embodiments, the nucleotide sequence comprising the transgene encoding the payload, e.g., an antibody molecule, comprises a nucleotide sequence encoding a signal sequence (e.g., a signal sequence region herein). In some embodiments, the nucleotide sequence comprising the transgene encoding the payload comprises two signal sequence regions. In some embodiments, the nucleotide sequence comprising the transgene encoding the payload comprises three or more signal sequence regions.

[1130] In some embodiments, the nucleotide sequence encoding the signal sequence is located 5′ relative to the nucleotide sequence encoding the VH and/or the heavy chain. In some embodiments, the nucleotide sequence encoding the signal sequence is located 5′ relative to the nucleotide sequence encoding the VL and/or the light chain. In some embodiments, the encoded VH, VL, heavy chain, and/or light chain of the encoded antibody molecule comprises a signal sequence at the N-terminus, wherein the signal sequence is optionally cleaved during cellular processing and/or localization of the antibody molecule.

[1131] In some embodiments, the signal sequence comprises any one of the signal sequences provided in Table 11A or a functional variant thereof. In some embodiments, the encoded signal sequence comprises an amino acid sequence encoded by any one of the nucleotide sequences provided in Table 11A, or an amino acid sequence with at least 70%, 75%, 80%, 85%, 90%, 95%, or 99% sequence identity thereto. In some embodiments, the nucleotide sequence encoding the signal sequence comprises any one of the nucleotide sequences provided in Table 11A, or a nucleotide sequence with at least 70%, 75%, 80%, 85%, 90%, 95%, or 99% sequence identity thereto.

TABLE 11A
Signal Sequence Regions

| | | SEQ | |
|---|---|---|---|
| | | ID | |
| Name | Length | NO | Sequence |
| Signal 17 | 57 NTs | 5157 | ATGGACTGGACCTGGAGG |
| | | | TTCCTCTTTGTGGTGGCA |
| | | | GCAGCTACAGGTGTCCAG |
| | | | TCC |
| Signal 17 | 19 | 5158 | MDWTWRFLFVVAAATGVQ |
| (amino | amino | | S |
| acid) | acids | | |
| Signal 17a | 57 NTs | 5032 | ATGGACTGGACCTGGAGG |
| | | | TTCCTCTTTGTGGTGGCA |
| | | | GCAGCTACAGGTGTCCAG |
| | | | TCT |
| Signal 18 | 66 NTs | 5159 | ATGGACATGAGGGTCCCT |
| | | | GCTCAGCTCCTGGGGCTC |
| | | | CTGCTGCTCTGGCTCTCA |
| | | | GGTGCCAGATGT |
| Signal 18 | 22 amino | 5160 | MDMRVPAQLLGLLLLWLS |
| (amino | amino | | GARC |
| acid) | acids | | |

[1132] In some embodiments, the nucleotide sequence encoding the signal sequence comprises the nucleotide sequence of SEQ ID NO: 5157, or nucleotide sequence with at least 70%, 75%, 80%, 85%, 90%, 95%, or 99% sequence identity thereto. In some embodiments, the nucleotide sequence encoding the signal sequence comprises the nucleotide sequence of SEQ ID NO: 5032, or nucleotide sequence with at least 70%, 75%, 80%, 85%, 90%, 95%, or 99% sequence identity thereto. In some embodiments, the nucleotide sequence encoding the signal sequence comprises the nucleotide sequence of SEQ ID NO: 5159, or nucleotide sequence with at least 70%, 75%, 80%, 85%, 90%, 95%, or 99% sequence identity thereto. In some embodiments, the nucleotide sequence encoding the signal sequence comprises the nucleotide sequence of SEQ ID NO: 5157 and is located 5′ relative to the nucleotide sequence encoding the VH and/or the heavy chain of the antibody molecule. In some embodiments, the nucleotide sequence encoding the signal sequence comprises the nucleotide sequence of SEQ ID NO: 5159 and is located 5′ relative to the nucleotide sequence encoding the VL and/or the light chain of the antibody molecule.

[1133] In some embodiments, the encoded signal sequence comprises the amino acid sequence of SEQ ID NO: 5158, or amino acid sequence with at least 70%, 75%, 80%, 85%, 90%, 95%, or 99% sequence identity thereto. In some embodiments, the encoded signal sequence comprises the amino acid sequence of SEQ ID NO: 5160, or amino acid sequence with at least 70%, 75%, 80%, 85%, 90%, 95%, or 99% sequence identity thereto. In some embodiments, the encoded sequence comprises the amino acid sequence of SEQ ID NO: 5158 and is located at the N-terminus of the amino acid sequence of the encoded VH and/or heavy chain of the antibody molecule. In some embodiments, the encoded sequence comprises the amino acid sequence of SEQ ID NO: 5160 and is located at the N-terminus of the amino acid sequence of the encoded VL and/or light chain of the antibody molecule.

### AAV Particles Comprising a Genetic Element Encoding an Anti-HER2 Antibody Molecule

[1134] In some embodiments, the AAV particle comprises a genetic element comprising a nucleotide sequence comprising a transgene encoding a payload comprising an anti-HER2 antibody molecule. In some embodiments, the genetic element is replicated and packaged into an AAV particle. A cell, e.g., a target cell, transduced with an AAV particle comprising an anti-HER2 antibody molecule may express the encoded antibody molecule in the cell or secrete the encoded antibody molecule.

[1135] In some embodiments, the genetic element of an AAV particle described herein comprises a nucleotide sequence, e.g., a nucleotide sequence from the 5′ ITR to the 3′ ITR, comprising any of the nucleotide sequences of HER-04, HER-05, HER-10, HER-15, HER-42, HER-43, HER-46, HER-47, HER-53, HER-57, HER-62, HER-69, HER-73, HER-75, HER-77, HER-78, HER-82, HER-88, HER-89, HER-90, HER-91, HER-92, HER-97, HER-98, HER-99, HER-100, or HER-101, e.g., as described in Table 6, or a sequence substantially identical (e.g., having at least about 70%, 75%, 80%, 85%, 90%, 92%, 95%, 97%, 98%, or 99% sequence identity) to any of the aforesaid sequences. In some embodiments, the genetic element of an AAV particle described herein comprises a nucleotide sequence, e.g., a nucleotide sequence from the 5′ ITR to the 3′ ITR, comprising any of the nucleotide sequences in Table 6, or a sequence substantially identical (e.g., having at least about 70%, 75%, 80%, 85%, 90%, 92%, 95%, 97%, 98%, or 99% sequence identity) to any of the aforesaid sequences. In some embodiments, the genetic element of an AAV particle described herein comprises a nucleotide sequence, e.g., a nucleotide sequence from the 5′ ITR to the 3′ ITR, comprising any of the nucleotide sequences of SEQ ID NO: 5163, 5170, 5164, 5165, 5166, 5185, 5186, 5167, 5168, 5187, 5188, 5619, 5189, 5190, 5343, 5374, 5375, 6500, 6501, 6502, 6503, 6504, 6505, 6506, 6507, 6508, or 6509, or a sequence substantially identical (e.g., having at least about 70%, 75%, 80%, 85%, 90%, 92%, 95%, 97%, 98%, or 99% sequence identity) to any of the aforesaid sequences.

[1136] The present disclosure also provides in some embodiments, an antibody molecule that binds to HER2 encoded by any one of SEQ ID NOs: 5163, 5170, 5164, 5165, 5166, 5185, 5186, 5167, 5168, 5187, 5188, 5619, 5189, 5190, 5343, 5374, 5375, 6500, 6501, 6502, 6503, 6504, 6505, 6506, 6507, 6508, or 6509, or a sequence substantially identical (e.g., having at least about 70%, 75%, 80%, 85%, 90%, 92%, 95%, 97%, 98%, or 99% sequence identity) to any of the aforesaid sequences.

[1137] In some embodiments, the genetic element, e.g., any of the genetic elements described in Tables 6, 17-19, 23-26, 40, 42, 43, 68, and 69 may further comprise a Kozak sequence, a stuffer sequence, and/or a filler sequence.

[1138] In some embodiments, the genetic element comprises, in the 5′ to 3′ order, a 5′ ITR, a promoter region, an optional intronic region and/or exon region, a signal sequence, an antibody heavy chain region, a linker region, a signal sequence, an antibody light chain region, a polyadenylation sequence, an optional filler sequence, and a 3′ ITR. In some embodiments, the genetic element comprises, in the 5′ to 3′ order, a 5′ ITR, a promoter region, an optional intronic region and/or exon region, a signal sequence, an antibody light chain region, a linker region, a signal sequence, an antibody heavy chain region, a polyadenylation sequence, an optional filler sequence, and a 3′ ITR.

TABLE 6
ITR to ITR Sequences of AAV particles comprising anti-HER2 antibody polynucleotide
sequences

| ITR to | | ITR to | |
|---|---|---|---|
| ITR | | ITR | |
| Construct | Length | SEQ | |
| Name | (nt) | ID NO | Sequence |
| HER-04 | 3992 | 5163 | ctgcgcgctcgctcgctcactgaggccgcccgggcaaagcccgggcgtcgggcgacct |
| | | | ttggtcgcccggcctcagtgagcgagcgagcgcgcagagagggagtggccaactccat |
| | | | cactaggggttccttgtagttaatgattaacccgccatgctacttatctaccagggta |
| | | | atggggatcctctagaactatagctagtcgacattgattattgactagttattaatag |
| | | | taatcaattacggggtcattagttcatagcccatatatggagttccgcgttacataac |
| | | | ttacggtaaatggcccgcctggctgaccgcccaacgacccccgcccattgacgtcaat |
| | | | aatgacgtatgttcccatagtaacgccaatagggactttccattgacgtcaatgggtg |
| | | | gagtatttacggtaaactgcccacttggcagtacatcaagtgtatcatatgccaagta |
| | | | cgccccctattgacgtcaatgacggtaaatggcccgcctggcattatgcccagtacat |
| | | | gaccttatgggactttcctacttggcagtacatctacgtattagtcatcgctattacc |
| | | | atgtcgaggccacgttctgcttcactctccccatctcccccccctccccacccccaat |
| | | | tttgtatttatttattttttaattattttgtgcagcgatgggggcggggggggggggc |
| | | | gcgcgccaggcggggcggggcggggcgaggggcggggcggggcgaggcggagaggtgc |
| | | | ggcggcagccaatcagagcggcgcgctccgaaagtttccttttatggcgaggcggcgg |
| | | | cggcggcggccctataaaaagcgaagcgcgcggcgggcgggagcaagcttcgtttagt |
| | | | gaaccgtcagatcgcctggagacgccatccacgctgttttgacctccatagaagacac |
| | | | cgggaccgatccagcctccgcggattcgaatcccggccgggaacggtgcattggaacg |
| | | | cggattccccgtgccaagagtgacgtaagtaccgcctatagagtctataggcccacaa |
| | | | aaaatgctttcttcttttaatatacttttttgtttatcttatttctaatactttccct |
| | | | aatctctttctttcagggcaataatgatacaatgtatcatgcctctttgcaccattct |
| | | | aaagaataacagtgataatttctgggttaaggcaatagcaatatttctgcatataaat |
| | | | atttctgcatataaattgtaactgatgtaagaggtttcatattgctaatagcagctac |
| | | | aatccagctaccattctgcttttattttatggttgggataaggctggattattctgag |
| | | | tccaagctaggcccttttgctaatcatgttcatacctcttatcttcctcccacagctc |
| | | | ctgggcaacgtgctggtctgtgtgctggcccatcactttggcaaagaattgggattcg |
| | | | aaccggtgccgccaccATGGACTGGACCTGGAGGTTCCTCTTTGTGGTGGCAGCAGCT |
| | | | ACAGGTGTCCAGTCCgaggttcagctggtggagtctggcggtggcctggtgcagccag |
| | | | ggggctcactccgtttgtcctgtgcagcttctggcttcaacattaaagacacctatat |
| | | | acactgggtgcgtcaggccccgggtaagggcctggaatgggttgcaaggatttatcct |
| | | | acgaatggttatactagatatgccgatagcgtcaagggccgtttcactataagcgcag |
| | | | acacatccaaaaacacagcctacctgcagatgaacagcctgcgtgctgaggacactgc |
| | | | cgtctattattgttctagatggggaggggacggcttctatgctatggacTACtggggt |
| | | | caaggaaccctggtcaccgtctcctcggcgtcgaccaagggcccatcggtcttccccc |
| | | | tggcaccctcctccaagagcacctctgggggcacagcggccctgggctgcctggtcaa |
| | | | ggactacttccccgaacctgtgacggtctcgtggaactcaggcgccctgaccagcggc |
| | | | gtgcacaccttcccggctgtcctacagtcctcaggactctactccctcagcagcgtgg |
| | | | tgaccgtgccctccagcagcttgggcacccagacctacatctgcaacgtgaatcacaa |
| | | | gcccagcaacaccaaggtggacaagaaagttgagcccCCCaaatcttgtgacaaaact |
| | | | cacacatgcccaccgtgcccagcacctgaactcctggggggaccgtcagtcttcctct |
| | | | tccccccaaaacccaaggacaccctcatgatctcccggacccctgaggtcacatgcgt |
| | | | ggtggtggacgtgagccacgaagaccctgaggtcaagttcaactggtacgtggacggc |
| | | | gtggaggtgcataatgccaagacaaagccgcgggaggagcagtacaacagcacgtacc |
| | | | gtgtggtcagcgtcctcaccgtcctgcaccaggactggctgaatggcaaggagtacaa |
| | | | gtgcaaggtctccaacaaagccctcccagcccccatcgagaaaaccatctccaaagcc |
| | | | aaagggcagccccgagaaccacaggtgtacaccctgcccccatcccgggatgagctga |
| | | | ccaagaaccaggtcagcctgacctgcctggtcaaaggcttctatcccagcgacatcgc |
| | | | cgtggagtgggagagcaatgggcagccggagaacaactacaagaccacgcctcccgtg |
| | | | ctggactccgacggctccttcttcctctacagcaagctcaccgtggacaagagcaggt |
| | | | ggcagcaggggaacgtcttctcatgctccgtgatgcatgaggctctgcacaaccacta |
| | | | cacgcagaagagcctctccctgtctccgggtaaaagaaagaggcgagagggcagagga |
| | | | agtcttctaacatgcggtgacgtggaggagaatcccggccctATGGACATGAGGGTCC |
| | | | CTGCTCAGCTCCTGGGGCTCCTGCTGCTCTGGCTCTCAGGTGCCAGATGTgatatcca |
| | | | gatgacccagtccccgagctccctgtccgcctctgtgggcgatagggtcaccatcacc |
| | | | tgccgtgccagtcaggatgtgaatactgctgtagcctggtatcaacagaaaccaggaa |
| | | | aagctccgaaactactgatttactcggcatccttcctcTACtctggagtcccttctcg |
| | | | cttctctggatccagatctgggacggatttcactctgaccatcagcagtctgcagccg |
| | | | gaagacttcgcaacttattactgtcagcaacattatactactcctcccacgttcggac |
| | | | agggtaccaaggtggagatcaaacgaactgtggctgcaccatctgtcttcatcttccc |
| | | | gccatctgatgagcagttgaaatctggaactgcctctgttgtgtgcctgctgaataac |
| | | | ttctatcccagagaggccaaagtacagtggaaggtggataacgccctccaatcgggta |
| | | | actcccaggagagtgtcacagagcaggacagcaaggacagcacctacagcctcagcag |
| | | | caccctgacgctgagcaaagcagactacgagaaacacaaagtctacgcctgcgaagtc |
| | | | acccatcagggcctgagctcgcccgtcacaaagagcttcaacaggggagagtgttagt |
| | | | agtaactcgaggacggggtgaactacgcctgaggatccgatctttttccctctgccaa |
| | | | aaattatggggacatcatgaagccccttgagcatctgacttctggctaataaaggaaa |
| | | | tttattttcattgcaatagtgtgttggaattttttgtgtctctcactcggcctaggta |
| | | | gataagtagcatggcgggttaatcattaactacaaggaacccctagtgatggagttgg |
| | | | ccactccctctctgcgcgctcgctcgctcactgaggccgggcgaccaaaggtcgcccg |
| | | | acgcccgggctttgcccgggcggcctcagtgagcgagcgagcgcgcag |
| HER-05 | 3986 | 5170 | ctgcgcgctcgctcgctcactgaggccgcccgggcaaagcccgggcgtcgggcgacct |
| | | | ttggtcgcccggcctcagtgagcgagcgagcgcgcagagagggagtggccaactccat |
| | | | cactaggggttccttgtagttaatgattaacccgccatgctacttatctaccagggta |
| | | | atggggatcctctagaactatagctagtcgacattgattattgactagttattaatag |
| | | | taatcaattacggggtcattagttcatagcccatatatggagttccgcgttacataac |
| | | | ttacggtaaatggcccgcctggctgaccgcccaacgacccccgcccattgacgtcaat |
| | | | aatgacgtatgttcccatagtaacgccaatagggactttccattgacgtcaatgggtg |
| | | | gagtatttacggtaaactgcccacttggcagtacatcaagtgtatcatatgccaagta |
| | | | cgccccctattgacgtcaatgacggtaaatggcccgcctggcattatgcccagtacat |
| | | | gaccttatgggactttcctacttggcagtacatctacgtattagtcatcgctattacc |
| | | | atgtcgaggccacgttctgcttcactctccccatctcccccccctccccacccccaat |
| | | | tttgtatttatttattttttaattattttgtgcagcgatgggggcggggggggggggc |
| | | | gcgcgccaggcgggcgggggcggggcgaggggcggggcggggcgaggcggagaggtgc |
| | | | ggcggcagccaatcagagcggcgcgctccgaaagtttccttttatggcgaggcggcgg |
| | | | cggcggcggccctataaaaagcgaagcgcgcggcgggcgggagcaagcttcgtttagt |
| | | | gaaccgtcagatcgcctggagacgccatccacgctgttttgacctccatagaagacac |
| | | | cgggaccgatccagcctccgcggattcgaatcccggccgggaacggtgcattggaacg |
| | | | cggattccccgtgccaagagtgacgtaagtaccgcctatagagtctataggcccacaa |
| | | | aaaatgctttcttcttttaatatacttttttgtttatcttatttctaatactttccct |
| | | | aatctctttctttcagggcaataatgatacaatgtatcatgcctctttgcaccattct |
| | | | aaagaataacagtgataatttctgggttaaggcaatagcaatatttctgcatataaat |
| | | | atttctgcatataaattgtaactgatgtaagaggtttcatattgctaatagcagctac |
| | | | aatccagctaccattctgcttttattttatggttgggataaggctggattattctgag |
| | | | tccaagctaggcccttttgctaatcatgttcatacctcttatcttcctcccacagctc |
| | | | ctgggcaacgtgctggtctgtgtgctggcccatcactttggcaaagaattgggattcg |
| | | | aaccggtgccgccaccATGGACTGGACCTGGAGGTTCCTCTTTGTGGTGGCAGCAGCT |
| | | | ACAGGTGTCCAGTCCgaggttcagctggtggagtctggcggtggcctggtgcagccag |
| | | | ggggctcactccgtttgtcctgtgcagcttctggcttcaCcTTCaCCgacTATACCAT |
| | | | GGATtgggtgcgtcaggccccgggtaagggcctggaatgggttgcaGACGTGAATcct |
| | | | AATTCTggtGGTTCTATAtatAATCAGCGTTTCaagggccgtttcactCTGagcGTTg |
| | | | acCGTtccaaaaacacaCTGtacctgcagatgaacagcctgcgtgctgaggacactgc |
| | | | cgtctattattgtGCAagaAATCTGgggCCTAGCttctatTTCgacTACtggggtcaa |
| | | | ggaaccctggtcaccgtctcctcggcgtcgaccaagggcccatcggtcttccccctgg |
| | | | caccctcctccaagagcacctctgggggcacagcggccctgggctgcctggtcaagga |
| | | | ctacttccccgaacctgtgacggtctcgtggaactcaggcgccctgaccagcggcgtg |
| | | | cacaccttcccggctgtcctacagtcctcaggactctactccctcagcagcgtggtga |
| | | | ccgtgccctccagcagcttgggcacccagacctacatctgcaacgtgaatcacaagcc |
| | | | cagcaacaccaaggtggacaagaaagttgagcccaaatcttgtgacaaaactcacaca |
| | | | tgcccaccgtgcccagcacctgaactcctggggggaccgtcagtcttcctcttccccc |
| | | | caaaacccaaggacaccctcatgatctcccggacccctgaggtcacatgcgtggtggt |
| | | | ggacgtgagccacgaagaccctgaggtcaagttcaactggtacgtggacggcgtggag |
| | | | gtgcataatgccaagacaaagccgcgggaggagcagtacaacagcacgtaccgtgtgg |
| | | | tcagcgtcctcaccgtcctgcaccaggactggctgaatggcaaggagtacaagtgcaa |
| | | | ggtctccaacaaagccctcccagcccccatcgagaaaaccatctccaaagccaaaggg |
| | | | cagccccgagaaccacaggtgtacaccctgcccccatcccgggaGgagAtgaccaaga |
| | | | accaggtcagcctgacctgcctggtcaaaggcttctatcccagcgacatcgccgtgga |
| | | | gtgggagagcaatgggcagccggagaacaactacaagaccacgcctcccgtgctggac |
| | | | tccgacggctccttcttcctctacagcaagctcaccgtggacaagagcaggtggcagc |
| | | | aggggaacgtcttctcatgctccgtgatgcatgaggctctgcacaaccactacacgca |
| | | | gaagagcctctccctgtctccgggtaaaagaaagaggcgagagggcagaggaagtctt |
| | | | ctaacatgcggtgacgtggaggagaatcccggccctATGGACATGAGGGTCCCTGCTC |
| | | | AGCTCCTGGGGCTCCTGCTGCTCTGGCTCTCAGGTGCCAGATGTgatatccagatgac |
| | | | ccagtccccgagctccctgtccgcctctgtgggcgatagggtcaccatcacctgcAAA |
| | | | gccagtcaggatgtgTCCATTGGGgtagcctggtatcaacagaaaccaggaaaagctc |
| | | | cgaaactactgatttactcggcatccTATCGCTACACGggagtcccttctcgcttctc |
| | | | tggatccGGTtctgggacggatttcactctgaccatcagcagtctgcagccggaagac |
| | | | ttcgcaacttattactgtcagcaaTACtatATCTATcctTACacgttcggacagggta |
| | | | ccaaggtggagatcaaacgaactgtggctgcaccatctgtcttcatcttcccgccatc |
| | | | tgatgagcagttgaaatctggaactgcctctgttgtgtgcctgctgaataacttctat |
| | | | cccagagaggccaaagtacagtggaaggtggataacgccctccaatcgggtaactccc |
| | | | aggagagtgtcacagagcaggacagcaaggacagcacctacagcctcagcagcaccct |
| | | | gacgctgagcaaagcagactacgagaaacacaaagtctacgcctgcgaagtcacccat |
| | | | cagggcctgagctcgcccgtcacaaagagcttcaacaggggagagtgttagtagtaac |
| | | | tcgaggacggggtgaactacgcctgaggatccgatctttttccctctgccaaaaatta |
| | | | tggggacatcatgaagccccttgagcatctgacttctggctaataaaggaaatttatt |
| | | | ttcattgcaatagtgtgttggaattttttgtgtctctcactcggcctaggtagataag |
| | | | tagcatgggggttaatcattaactacaaggaacccctagtgatggagttggccactc |
| | | | cctctctgcgcgctcgctcgctcactgaggccgggcgaccaaaggtcgcccgacgccc |
| | | | gggctttgcccgggggcctcagtgagcgagcgagcgcgcag |
| HER-10 | 3989 | 5164 | ctgcgcgctcgctcgctcactgaggccgcccgggcaaagcccgggcgtcgggcgacct |
| | | | ttggtcgcccggcctcagtgagcgagcgagcgcgcagagagggagtggccaactccat |
| | | | cactaggggttccttgtagttaatgattaacccgccatgctacttatctaccagggta |
| | | | atggggatcctctagaactatagctagtcGACATTGATTATTGACTAGTTATTAATAG |
| | | | TAATCAATTACGGGGTCATTAGTTCATAGCCCATATATGGAGTTCCGCGTTACATAAC |
| | | | TTACGGTAAATGGCCCGCCTGGCTGACCGCCCAACGACCCCCGCCCATTGACGTCAAT |
| | | | AATGACGTATGTTCCCATAGTAACGCCAATAGGGACTTTCCATTGACGTCAATGGGTG |
| | | | GAGTATTTACGGTAAACTGCCCACTTGGCAGTACATCAAGTGTATCATATGCCAAGTA |
| | | | CGCCCCCTATTGACGTCAATGACGGTAAATGGCCCGCCTGGCATTATGCCCAGTACAT |
| | | | GACCTTATGGGACTTTCCTACTTGGCAGTACATCTACGTATTAGTCATCGCTATTACC |
| | | | ATGtcgaggccacgttctgcttcactctccccatctcccccccctccccacccccaat |
| | | | tttgtatttatttattttttaattattttgtgcagcgatgggggcggggggggggggc |
| | | | gcgcgccaggcggggcggggcggggcgaggggcgggcgggggcgaggcggagaggtgc |
| | | | ggcggcagccaatcagagcggcgcgctccgaaagtttccttttatggcgaggcggcgg |
| | | | cggcggcggccctataaaaagcgaagcgcgcggcgggcgggagcaagcttcgtttagt |
| | | | gaaccgtcagatcgcctggagacgccatccacgctgttttgacctccatagaagacac |
| | | | cgggaccgatccagcctccgcggattcgaatcccggccgggaacggtgcattggaacg |
| | | | cggattccccgtgccaagagtgacgtaagtaccgcctatagagtctataggcccacaa |
| | | | aaaatgctttcttcttttaatatacttttttgtttatcttatttctaatactttccct |
| | | | aatctctttctttcagggcaataatgatacaatgtatcatgcctctttgcaccattct |
| | | | aaagaataacagtgataatttctgggttaaggcaatagcaatatttctgcatataaat |
| | | | atttctgcatataaattgtaactgatgtaagaggtttcatattgctaatagcagctac |
| | | | aatccagctaccattctgcttttattttatggttgggataaggctggattattctgag |
| | | | tccaagctaggcccttttgctaatcatgttcatacctcttatcttcctcccacagctc |
| | | | ctgggcaacgtgctggtctgtgtgctggcccatcactttggcaaagaattgggattcg |
| | | | aaccggtgccgccaccATGGACTGGACCTGGAGGTTCCTCTTTGTGGTGGCAGCAGCT |
| | | | ACAGGTGTCCAGTCCCAGGTGCAGCTGCAGCAGAGCGGCCCCGAGCTGGTGAAGCCCG |
| | | | GCGCCAGCCTGAAGCTGAGCTGCACCGCCAGCGGCTTCAACATCAAGGACACCTACAT |
| | | | CCACTGGGTGAAGCAGAGACCCGAGCAGGGCCTGGAGTGGATCGGCAGAATCTACCCC |
| | | | ACCAACGGCTACACCAGATACGACCCCAAGTTCCAGGACAAGGCCACCATCACCGCCG |
| | | | ACACCAGCAGCAACACCGCCTACCTGCAGGTGAGCAGACTGACCAGCGAGGACACCGC |
| | | | CGTGTACTACTGCAGCAGATGGGGCGGCGACGGCTTCTACGCCATGGACTACTGGGGC |
| | | | CAGGGCGCCAGCGTGACCGTGAGCAGCgcgtcgaccaagggcccatcggtcttccccc |
| | | | tggcaccctcctccaagagcacctctgggggcacagcggccctgggctgcctggtcaa |
| | | | ggactacttccccgaacctgtgacggtctcgtggaactcaggcgccctgaccagcggc |
| | | | gtgcacaccttcccggctgtcctacagtcctcaggactctactccctcagcagcgtgg |
| | | | tgaccgtgccctccagcagcttgggcacccagacctacatctgcaacgtgaatcacaa |
| | | | gcccagcaacaccaaggtggacaagaGagttgagcccaaatcttgtgacaaaactcac |
| | | | acatgcccaccgtgcccagcacctgaactcGtggggggaccgtcagtcttcctcCtcc |
| | | | ccccaaaacccaaggacaccctcatgatctcccggacccctgaggtcacatgcgtggt |
| | | | ggtggacgtgagccacgaagaccctgaggtcaagttcaactggtacgtggacggcgtg |
| | | | gaggtgcataatgccaagacaaagccgcCggaggagcagtacaacagcacgCTccgtg |
| | | | tggtcagcgtcctcaccgtcctgcaccaggactggctgaatggcaaggagtacaagtg |
| | | | caaggtctccaacaaagccctcccagcccccatcgagaaaaccatctccaaagccaaa |
| | | | gggcagccccgagaaccacaggtgtacaccctgcccccatcccgggaTgagCtgacca |
| | | | agaaccaggtcagcctgacctgcctggtcaaaggcttctatcccagcgacatcgccgt |
| | | | ggagtgggagagcaatgggcagccggagaacaactacaagaccacgcctcTcgtgctg |
| | | | gactccgacggctccttcttcctctacagcaagctcaccgtggacaagagcaggtggc |
| | | | agcaggggaacgtcttctcatgctccgtgatgcatgaggctctgcacaaccactacac |
| | | | gcagaagagcctctccctgtctccgggtaaaagaaagaggcgagagggcagaggaagt |
| | | | cttctaacatgcggtgacgtggaggagaatcccggccctATGGACATGAGGGTCCCTG |
| | | | CTCAGCTCCTGGGGCTCCTGCTGCTCTGGCTCTCAGGTGCCAGATGTGACATCGTGAT |
| | | | GACCCAGAGCCACAAGTTCATGAGCACCAGCGTGGGCGACAGAGTGAGCATCACCTGC |
| | | | AAGGCCAGCCAGGACGTGAACACCGCCGTGGCCTGGTACCAGCAGAAGCCCGGCCACA |
| | | | GCCCCAAGCTGCTGATCTACAGCGCCAGCTTCAGATACACCGGCGTGCCGGACAGATT |
| | | | CACCGGCAGCAGAAGCGGCACCGACTTCACCTTCACCATCAGCAGCGTGCAGGCCGAG |
| | | | GACCTGGCCGTGTACTACTGCCAGCAGCACTACACCACCCCTCCTACCTTCGGCGGCG |
| | | | GCACCAAGGTGGAGATCAAGAGAACCGTGGCCGCCCCTAGCGTGTTCATCTTCCCGCC |
| | | | AAGCGACGAGCAGCTGAAGAGCGGCACCGCCAGCGTGGTGTGCCTGCTGAACAACTTC |
| | | | TACCCCAGAGAGGCCAAGGTGCAGTGGAAGGTGGACAACGCCCTGCAGAGCGGCAACA |
| | | | GCCAGGAGAGCGTGACCGAGCAGGACAGCAAGGACAGCACCTACAGCCTGAGCAGCAC |
| | | | CCTGACCCTGAGCAAGGCCGACTACGAGAAGCACAAGGTGTACGCCTGCGAGGTGACC |
| | | | CACCAGGGCCTGAGCAGCCCCGTGACCAAGAGCTTCAACAGAGGCGAGTGCtagtagt |
| | | | aactcgaggacggggtgaactacgcctgaggatccgatctttttccctctgccaaaaa |
| | | | ttatggggacatcatgaagccccttgagcatctgacttctggctaataaaggaaattt |
| | | | attttcattgcaatagtgtgttggaattttttgtgtctctcactcggcctaggtagat |
| | | | aagtagcatggcgggttaatcattaactacaaggaacccctagtgatggagttggcca |
| | | | ctccctctctgcgcgctcgctcgctcactgaggccgggcgaccaaaggtcgcccgacg |
| | | | cccgggctttgcccgggggcctcagtgagcgagcgagcgcgcag |
| HER-15 | 4220 | 5165 | ctgcgcgctcgctcgctcactgaggccgcccgggcaaagcccgggcgtcgggcgacct |
| | | | ttggtcgcccggcctcagtgagcgagcgagcgcgcagagagggagtggccaactccat |
| | | | cactaggggttccttgtagttaatgattaacccgccatgctacttatctaccagggta |
| | | | atggggatcctctagaactatagctagtcGACATTGATTATTGACTAGTTATTAATAG |
| | | | TAATCAATTACGGGGTCATTAGTTCATAGCCCATATATGGAGTTCCGCGTTACATAAC |
| | | | TTACGGTAAATGGCCCGCCTGGCTGACCGCCCAACGACCCCCGCCCATTGACGTCAAT |
| | | | AATGACGTATGTTCCCATAGTAACGCCAATAGGGACTTTCCATTGACGTCAATGGGTG |
| | | | GAGTATTTACGGTAAACTGCCCACTTGGCAGTACATCAAGTGTATCATATGCCAAGTA |
| | | | CGCCCCCTATTGACGTCAATGACGGTAAATGGCCCGCCTGGCATTATGCCCAGTACAT |
| | | | GACCTTATGGGACTTTCCTACTTGGCAGTACATCTACGTATTAGTCATCGCTATTACC |
| | | | ATGtcgaggccacgttctgcttcactctccccatctcccccccctccccacccccaat |
| | | | tttgtatttatttattttttaattattttgtgcagcgatgggggcggggggggggggc |
| | | | ggcggcagccaatcagagcggcgcgctccgaaagtttccttttatggcgaggcggcgg |
| | | | cggcggcggccctataaaaagcgaagcgcgcggcgggcgggagcaagcttcgtttagt |
| | | | gaaccgtcagatcgcctggagacgccatccacgctgttttgacctccatagaagacac |
| | | | cgggaccgatccagcctccgcggattcgaatcccggccgggaacggtgcattggaacg |
| | | | cggattccccgtgccaagagtgacgtaagtaccgcctatagagtctataggcccacaa |
| | | | aaaatgctttcttcttttaatatacttttttgtttatcttatttctaatactttccct |
| | | | aatctctttctttcagggcaataatgatacaatgtatcatgcctctttgcaccattct |
| | | | aaagaataacagtgataatttctgggttaaggcaatagcaatatttctgcatataaat |
| | | | atttctgcatataaattgtaactgatgtaagaggtttcatattgctaatagcagctac |
| | | | aatccagctaccattctgcttttattttatggttgggataaggctggattattctgag |
| | | | tccaagctaggcccttttgctaatcatgttcatacctcttatcttcctcccacagctc |
| | | | ctgggcaacgtgctggtctgtgtgctggcccatcactttggcaaagaattgggattcg |
| | | | aaccggtgccgccaccATGGACTGGACCTGGAGGTTCCTCTTTGTGGTGGCAGCAGCT |
| | | | ACAGGTGTCCAGTCCgaggttcagctggtggagtctggcggtggcctggtgcagccag |
| | | | ggggctcactccgtttgtcctgtgcagcttctggcttcaCcTTCaCCgacTATACCAT |
| | | | GGATtgggtgcgtcaggccccgggtaagggcctggaatgggttgcaGACGTGAATcct |
| | | | AATTCTggtGGTTCTATAtatAATCAGCGTTTCaagggccgtttcactCTGagcGTTg |
| | | | acCGTtccaaaaacacaCTGtacctgcagatgaacagcctgcgtgctgaggacactgc |
| | | | cgtctattattgtGCAagaAATCTGgggCCTAGCttctatTTCgacTACtggggtcaa |
| | | | ggaaccctggtcaccgtctcctcggcgtcgaccaagggcccatcggtcttccccctgg |
| | | | caccctcctccaagagcacctctgggggcacagcggccctgggctgcctggtcaagga |
| | | | ctacttccccgaacctgtgacggtctcgtggaactcaggcgccctgaccagcggcgtg |
| | | | cacaccttcccggctgtcctacagtcctcaggactctactccctcagcagcgtggtga |
| | | | ccgtgccctccagcagcttgggcacccagacctacatctgcaacgtgaatcacaagcc |
| | | | cagcaacaccaaggtggacaagaaagttgagcccaaatcttgtgacaaaactcacaca |
| | | | tgcccaccgtgcccagcacctgaactcctggggggaccgtcagtcttcctcttccccc |
| | | | caaaacccaaggacaccctcatgatctcccggacccctgaggtcacatgcgtggtggt |
| | | | ggacgtgagccacgaagaccctgaggtcaagttcaactggtacgtggacggcgtggag |
| | | | gtgcataatgccaagacaaagccgcgggaggagcagtacaacagcacgtaccgtgtgg |
| | | | tcagcgtcctcaccgtcctgcaccaggactggctgaatggcaaggagtacaagtgcaa |
| | | | ggtctccaacaaagccctcccagcccccatcgagaaaaccatctccaaagccaaaggg |
| | | | cagccccgagaaccacaggtgtacaccctgcccccatcccgggaGgagAtgaccaaga |
| | | | accaggtcagcctgacctgcctggtcaaaggcttctatcccagcgacatcgccgtgga |
| | | | gtgggagagcaatgggcagccggagaacaactacaagaccacgcctcccgtgctggac |
| | | | tccgacggctccttcttcctctacagcaagctcaccgtggacaagagcaggtggcagc |
| | | | aggggaacgtcttctcatgctccgtgatgcatgaggctctgcacaaccactacacgca |
| | | | gaagagcctctccctgtctccgggtaaaagaaagaggcgagagggcagaggaagtctt |
| | | | ctaacatgcggtgacgtggaggagaatcccggccctATGGACATGAGGGTCCCTGCTC |
| | | | AGCTCCTGGGGCTCCTGCTGCTCTGGCTCTCAGGTGCCAGATGTGGCGTGACCCTGTT |
| | | | CGTGGCCCTGTACGACTACACCAGCTACAACACCAGGGACCTGAGCTTCCACAAGGGC |
| | | | GAGAAGTTCCAGATCCTGAGGATGGAGGACGGCGTGTGGTGGGAGGCCAGGAGCCTGA |
| | | | CCACCGGCGAGACCGGCTACATCCCCAGCAACTACGTGGCCCCCGTGGACAGCATCCA |
| | | | GggtggtggtggatccggaggaggaggaAGTggaggtggaggtTCTgatatccagatg |
| | | | acccagtccccgagctccctgtccgcctctgtgggcgatagggtcaccatcacctgcA |
| | | | AAgccagtcaggatgtgTCCATTGGGgtagcctggtatcaacagaaaccaggaaaagc |
| | | | tccgaaactactgatttactcggcatccTATCGCTACACGggagtcccttctcgcttc |
| | | | tctggatccGGTtctgggacggatttcactctgaccatcagcagtctgcagccggaag |
| | | | acttcgcaacttattactgtcagcaaTACtatATCTATcctTACacgttcggacaggg |
| | | | taccaaggtggagatcaaacgaactgtggctgcaccatctgtcttcatcttcccgcca |
| | | | tctgatgagcagttgaaatctggaactgcctctgttgtgtgcctgctgaataacttct |
| | | | atcccagagaggccaaagtacagtggaaggtggataacgccctccaatcgggtaactc |
| | | | ccaggagagtgtcacagagcaggacagcaaggacagcacctacagcctcagcagcacc |
| | | | ctgacgctgagcaaagcagactacgagaaacacaaagtctacgcctgcgaagtcaccc |
| | | | atcagggcctgagctcgcccgtcacaaagagcttcaacaggggagagtgttagtagta |
| | | | actcgaggacggggtgaactacgcctgaggatccgatctttttccctctgccaaaaat |
| | | | tatggggacatcatgaagccccttgagcatctgacttctggctaataaaggaaattta |
| | | | ttttcattgcaatagtgtgttggaattttttgtgtctctcactcggcctaggtagata |
| | | | agtagcatggcgggttaatcattaactacaaggaacccctagtgatggagttggccac |
| | | | tccctctctgcgcgctcgctcgctcactgaggccgggcgaccaaaggtcgcccgacgc |
| | | | ccgggctttgcccgggcggcctcagtgagcgagcgagcgcgcag |
| HER-42 | 3992 | 5166 | ctgcgcgctcgctcgctcactgaggccgcccgggcaaagcccgggcgtcgggcgacct |
| | | | ttggtcgcccggcctcagtgagcgagcgagcgcgcagagagggagtggccaactccat |
| | | | cactaggggttccttgtagttaatgattaacccgccatgctacttatctaccagggta |
| | | | atggggatcctctagaactatagctagtcGACATTGATTATTGACTAGTTATTAATAG |
| | | | TAATCAATTACGGGGTCATTAGTTCATAGCCCATATATGGAGTTCCGCGTTACATAAC |
| | | | TTACGGTAAATGGCCCGCCTGGCTGACCGCCCAACGACCCCCGCCCATTGACGTCAAT |
| | | | AATGACGTATGTTCCCATAGTAACGCCAATAGGGACTTTCCATTGACGTCAATGGGTG |
| | | | GAGTATTTACGGTAAACTGCCCACTTGGCAGTACATCAAGTGTATCATATGCCAAGTA |
| | | | CGCCCCCTATTGACGTCAATGACGGTAAATGGCCCGCCTGGCATTATGCCCAGTACAT |
| | | | GACCTTATGGGACTTTCCTACTTGGCAGTACATCTACGTATTAGTCATCGCTATTACC |
| | | | ATGtcgaggccacgttctgcttcactctccccatctcccccccctccccacccccaat |
| | | | tttgtatttatttattttttaattattttgtgcagcgatgggggcggggggggggggc |
| | | | gcgcgccaggcggggcggggcggggcgaggggcggggcggggcgaggcggagaggtgc |
| | | | ggcggcagccaatcagagcggcgcgctccgaaagtttccttttatggcgaggcggcgg |
| | | | cggcggcggccctataaaaagcgaagcgcgcggcgggcgggagcaagcttcgtttagt |
| | | | gaaccgtcagatcgcctggagacgccatccacgctgttttgacctccatagaagacac |
| | | | cgggaccgatccagcctccgcggattcgaatcccggccgggaacggtgcattggaacg |
| | | | cggattccccgtgccaagagtgacgtaagtaccgcctatagagtctataggcccacaa |
| | | | aaaatgctttcttcttttaatatacttttttgtttatcttatttctaatactttccct |
| | | | aatctctttctttcagggcaataatgatacaatgtatcatgcctctttgcaccattct |
| | | | aaagaataacagtgataatttctgggttaaggcaatagcaatatttctgcatataaat |
| | | | atttctgcatataaattgtaactgatgtaagaggtttcatattgctaatagcagctac |
| | | | aatccagctaccattctgcttttattttatggttgggataaggctggattattctgag |
| | | | tccaagctaggcccttttgctaatcatgttcatacctcttatcttcctcccacagctc |
| | | | ctgggcaacgtgctggtctgtgtgctggcccatcactttggcaaagaattgggattcg |
| | | | aaccggtgccgccaccATGGACTGGACCTGGAGGTTCCTCTTTGTGGTGGCAGCAGCT |
| | | | ACAGGTGTCCAGTCCgaggttcagctggtggagtctggcggtggcctggtgcagccag |
| | | | ggggctcactccgtttgtcctgtgcagcttctggcttcaacattaaagacacctatat |
| | | | acactgggtgcgtcaggccccgggtaagggcctggaatgggttgcaaggatttatcct |
| | | | acgaatggttatactagatatgccgatagcgtcaagggccgtttcactataagcgcag |
| | | | acacatccaaaaacacagcctacctgcagatgaacagcctgcgtgctgaggacactgc |
| | | | cgtctattattgttctagatggggaggggacggcttctatgctatggacTACtggggt |
| | | | caaggaaccctggtcaccgtctcctcggcgtcgaccaagggcccatcggtcttccccc |
| | | | tggcaccctcctccaagagcacctctgggggcacagcggccctgggctgcctggtcaa |
| | | | ggactacttccccgaacctgtgacggtctcgtggaactcaggcgccctgaccagcggc |
| | | | gtgcacaccttcccggctgtcctacagtcctcaggactctactccctcagcagcgtgg |
| | | | tgaccgtgccctccagcagcttgggcacccagacctacatctgcaacgtgaatcacaa |
| | | | gcccagcaacaccaaggtggacaagaaagttgagcccCCCaaatcttgtgacaaaact |
| | | | cacacatgcccaccgtgcccagcacctgaactcctggggggaccgtcagtcttcctct |
| | | | tccccccaaaacccaaggacaccctcatgatctcccggacccctgaggtcacatgcgt |
| | | | ggtggtggacgtgagccacgaagaccctgaggtcaagttcaactggtacgtggacggc |
| | | | gtggaggtgcataatgccaagacaaagccgcgggaggagcagtacaacagcacgtacc |
| | | | gtgtggtcagcgtcctcaccgtcctgcaccaggactggctgaatggcaaggagtacaa |
| | | | gtgcaaggtctccaacaaagccctcccagcccccatcgagaaaaccatctccaaagcc |
| | | | aaagggcagccccgagaaccacaggtgtacaccctgcccccatcccgggatgagctga |
| | | | ccaagaaccaggtcagcctgacctgcctggtcaaaggcttctatcccagcgacatcgc |
| | | | cgtggagtgggagagcaatgggcagccggagaacaactacaagaccacgcctcccgtg |
| | | | ctggactccgacggctccttcttcctctacagcaagctcaccgtggacaagagcaggt |
| | | | ggcagcaggggaacgtcttctcatgctccgtgatgcatgaggctctgcacaacCAGta |
| | | | cacgcagaagagcctctccctgtctccgggtaaaAgaaagaggcgagagggcagagga |
| | | | agtcttctaacatgcggtgacgtggaggagaatcccggccctATGGACATGAGGGTCC |
| | | | CTGCTCAGCTCCTGGGGCTCCTGCTGCTCTGGCTCTCAGGTGCCAGATGTgatatcca |
| | | | gatgacccagtccccgagctccctgtccgcctctgtgggcgatagggtcaccatcacc |
| | | | tgccgtgccagtcaggatgtgaatactgctgtagcctggtatcaacagaaaccaggaa |
| | | | aagctccgaaactactgatttactcggcatccttcctcTACtctggagtcccttctcg |
| | | | cttctctggatccagatctgggacggatttcactctgaccatcagcagtctgcagccg |
| | | | gaagacttcgcaacttattactgtcagcaacattatactactcctcccacgttcggac |
| | | | agggtaccaaggtggagatcaaacgaactgtggctgcaccatctgtcttcatcttccc |
| | | | gccatctgatgagcagttgaaatctggaactgcctctgttgtgtgcctgctgaataac |
| | | | ttctatcccagagaggccaaagtacagtggaaggtggataacgccctccaatcgggta |
| | | | actcccaggagagtgtcacagagcaggacagcaaggacagcacctacagcctcagcag |
| | | | caccctgacgctgagcaaagcagactacgagaaacacaaagtctacgcctgcgaagtc |
| | | | acccatcagggcctgagctcgcccgtcacaaagagcttcaacaggggagagtgttagt |
| | | | agtaactcgaggacggggtgaactacgcctgaggatccgatctttttccctctgccaa |
| | | | aaattatggggacatcatgaagccccttgagcatctgacttctggctaataaaggaaa |
| | | | tttattttcattgcaatagtgtgttggaattttttgtgtctctcactcggcctaggta |
| | | | gataagtagcatggcgggttaatcattaactacaaggaacccctagtgatggagttgg |
| | | | ccactccctctctgcgcgctcgctcgctcactgaggccgggcgaccaaaggtcgcccg |
| | | | acgcccgggctttgcccgggcggcctcagtgagcgagcgagcgcgcag |
| HER-43 | 3992 | 5185 | ctgcgcgctcgctcgctcactgaggccgcccgggcaaagcccgggcgtcgggcgacct |
| | | | ttggtcgcccggcctcagtgagcgagcgagcgcgcagagagggagtggccaactccat |
| | | | cactaggggttccttgtagttaatgattaacccgccatgctacttatctaccagggta |
| | | | atggggatcctctagaactatagctagtcgacattgattattgactagttattaatag |
| | | | taatcaattacggggtcattagttcatagcccatatatggagttccgcgttacataac |
| | | | ttacggtaaatggcccgcctggctgaccgcccaacgacccccgcccattgacgtcaat |
| | | | aatgacgtatgttcccatagtaacgccaatagggactttccattgacgtcaatgggtg |
| | | | gagtatttacggtaaactgcccacttggcagtacatcaagtgtatcatatgccaagta |
| | | | cgccccctattgacgtcaatgacggtaaatggcccgcctggcattatgcccagtacat |
| | | | gaccttatgggactttcctacttggcagtacatctacgtattagtcatcgctattacc |
| | | | atgtcgaggccacgttctgcttcactctccccatctcccccccctccccacccccaat |
| | | | tttgtatttatttattttttaattattttgtgcagcgatgggggcggggggggggggc |
| | | | gcgcgccaggcggggcggggcggggcgaggggcggggcggggcgaggcggagaggtgc |
| | | | ggcggcagccaatcagagcggcgcgctccgaaagtttccttttatggcgaggcggcgg |
| | | | cggcggcggccctataaaaagcgaagcgcgcggcgggcgggagcaagcttcgtttagt |
| | | | gaaccgtcagatcgcctggagacgccatccacgctgttttgacctccatagaagacac |
| | | | cgggaccgatccagcctccgcggattcgaatcccggccgggaacggtgcattggaacg |
| | | | cggattccccgtgccaagagtgacgtaagtaccgcctatagagtctataggcccacaa |
| | | | aaaatgctttcttcttttaatatacttttttgtttatcttatttctaatactttccct |
| | | | aatctctttctttcagggcaataatgatacaatgtatcatgcctctttgcaccattct |
| | | | aaagaataacagtgataatttctgggttaaggcaatagcaatatttctgcatataaat |
| | | | atttctgcatataaattgtaactgatgtaagaggtttcatattgctaatagcagctac |
| | | | aatccagctaccattctgcttttattttatggttgggataaggctggattattctgag |
| | | | tccaagctaggcccttttgctaatcatgttcatacctcttatcttcctcccacagctc |
| | | | ctgggcaacgtgctggtctgtgtgctggcccatcactttggcaaagaattgggattcg |
| | | | aaccggtgccgccaccATGGACTGGACCTGGAGGTTCCTCTTTGTGGTGGCAGCAGCT |
| | | | ACAGGTGTCCAGTCCgaggttcagctggtggagtctggcggtggcctggtgcagccag |
| | | | ggggctcactccgtttgtcctgtgcagcttctggcttcaacattaaagacacctatat |
| | | | acactgggtgcgtcaggccccgggtaagggcctggaatgggttgcaaggatttatcct |
| | | | acgaatggttatactagatatgccgatagcgtcaagggccgtttcactataagcgcag |
| | | | acacatccaaaaacacagcctacctgcagatgaacagcctgcgtgctgaggacactgc |
| | | | cgtctattattgttctagatggggaggggacggcttctatgctatggacTACtggggt |
| | | | caaggaaccctggtcaccgtctcctcggcgtcgaccaagggcccatcggtcttccccc |
| | | | tggcaccctcctccaagagcacctctgggggcacagcggccctgggctgcctggtcaa |
| | | | ggactacttccccgaacctgtgacggtctcgtggaactcaggcgccctgaccagcggc |
| | | | gtgcacaccttcccggctgtcctacagtcctcaggactctactccctcagcagcgtgg |
| | | | tgaccgtgccctccagcagcttgggcacccagacctacatctgcaacgtgaatcacaa |
| | | | gcccagcaacaccaaggtggacaagaaagttgagcccCCCaaatcttgtgacaaaact |
| | | | cacacatgcccaccgtgcccagcacctgaactcctggggggaccgtcagtcttcctct |
| | | | tccccccaaaacccaaggacaccctcatgGCAtcccggacccctgaggtcacatgcgt |
| | | | ggtggtggacgtgagccacgaagaccctgaggtcaagttcaactggtacgtggacggc |
| | | | gtggaggtgcataatgccaagacaaagccgcgggaggagcagtacaacagcacgtacc |
| | | | gtgtggtcagcgtcctcaccgtcctgGCCcaggactggctgaatggcaaggagtacaa |
| | | | gtgcaaggtctccaacaaagccctcccagcccccatcgagaaaaccatctccaaagcc |
| | | | aaagggcagccccgagaaccacaggtgtacaccctgcccccatcccgggatgagctga |
| | | | ccaagaaccaggtcagcctgacctgcctggtcaaaggcttctatcccagcgacatcgc |
| | | | cgtggagtgggagagcaatgggcagccggagaacaactacaagaccacgcctcccgtg |
| | | | ctggactccgacggctccttcttcctctacagcaagctcaccgtggacaagagcaggt |
| | | | ggcagcaggggaacgtcttctcatgctccgtgatgcatgaggctctgcacaaccacta |
| | | | cacgcagaagagcctctccctgtctccgggtaaaagaaagaggcgagagggcagagga |
| | | | agtcttctaacatgcggtgacgtggaggagaatcccggccctATGGACATGAGGGTCC |
| | | | CTGCTCAGCTCCTGGGGCTCCTGCTGCTCTGGCTCTCAGGTGCCAGATGTgatatcca |
| | | | gatgacccagtccccgagctccctgtccgcctctgtgggcgatagggtcaccatcacc |
| | | | tgccgtgccagtcaggatgtgaatactgctgtagcctggtatcaacagaaaccaggaa |
| | | | aagctccgaaactactgatttactcggcatccttcctcTACtctggagtcccttctcg |
| | | | cttctctggatccagatctgggacggatttcactctgaccatcagcagtctgcagccg |
| | | | gaagacttcgcaacttattactgtcagcaacattatactactcctcccacgttcggac |
| | | | agggtaccaaggtggagatcaaacgaactgtggctgcaccatctgtcttcatcttccc |
| | | | gccatctgatgagcagttgaaatctggaactgcctctgttgtgtgcctgctgaataac |
| | | | ttctatcccagagaggccaaagtacagtggaaggtggataacgccctccaatcgggta |
| | | | actcccaggagagtgtcacagagcaggacagcaaggacagcacctacagcctcagcag |
| | | | caccctgacgctgagcaaagcagactacgagaaacacaaagtctacgcctgcgaagtc |
| | | | acccatcagggcctgagctcgcccgtcacaaagagcttcaacaggggagagtgttagt |
| | | | agtaactcgaggacggggtgaactacgcctgaggatccgatctttttccctctgccaa |
| | | | aaattatggggacatcatgaagccccttgagcatctgacttctggctaataaaggaaa |
| | | | tttattttcattgcaatagtgtgttggaattttttgtgtctctcactcggcctaggta |
| | | | gataagtagcatggcgggttaatcattaactacaaggaacccctagtgatggagttgg |
| | | | ccactccctctctgcgcgctcgctcgctcactgaggccgggcgaccaaaggtcgcccg |
| | | | acgcccgggctttgcccgggcggcctcagtgagcgagcgagcgcgcag |
| HER-46 | 3992 | 5186 | ctgcgcgctcgctcgctcactgaggccgcccgggcaaagcccgggcgtcgggcgacct |
| | | | ttggtcgcccggcctcagtgagcgagcgagcgcgcagagagggagtggccaactccat |
| | | | cactaggggttccttgtagttaatgattaacccgccatgctacttatctaccagggta |
| | | | atggggatcctctagaactatagctagtcgacattgattattgactagttattaatag |
| | | | taatcaattacggggtcattagttcatagcccatatatggagttccgcgttacataac |
| | | | ttacggtaaatggcccgcctggctgaccgcccaacgacccccgcccattgacgtcaat |
| | | | aatgacgtatgttcccatagtaacgccaatagggactttccattgacgtcaatgggtg |
| | | | gagtatttacggtaaactgcccacttggcagtacatcaagtgtatcatatgccaagta |
| | | | cgccccctattgacgtcaatgacggtaaatggcccgcctggcattatgcccagtacat |
| | | | gaccttatgggactttcctacttggcagtacatctacgtattagtcatcgctattacc |
| | | | atgtcgaggccacgttctgcttcactctccccatctcccccccctccccacccccaat |
| | | | tttgtatttatttattttttaattattttgtgcagcgatgggggcggggggggggggc |
| | | | gcgcgccaggcggggcggggcggggcgaggggcggggcggggcgaggcggagaggtgc |
| | | | ggcggcagccaatcagagcggcgcgctccgaaagtttccttttatggcgaggcggcgg |
| | | | cggcggcggccctataaaaagcgaagcgcgcggcgggcgggagcaagcttcgtttagt |
| | | | gaaccgtcagatcgcctggagacgccatccacgctgttttgacctccatagaagacac |
| | | | cgggaccgatccagcctccgcggattcgaatcccggccgggaacggtgcattggaacg |
| | | | cggattccccgtgccaagagtgacgtaagtaccgcctatagagtctataggcccacaa |
| | | | aaaatgctttcttcttttaatatacttttttgtttatcttatttctaatactttccct |
| | | | aatctctttctttcagggcaataatgatacaatgtatcatgcctctttgcaccattct |
| | | | aaagaataacagtgataatttctgggttaaggcaatagcaatatttctgcatataaat |
| | | | atttctgcatataaattgtaactgatgtaagaggtttcatattgctaatagcagctac |
| | | | aatccagctaccattctgcttttattttatggttgggataaggctggattattctgag |
| | | | tccaagctaggcccttttgctaatcatgttcatacctcttatcttcctcccacagctc |
| | | | ctgggcaacgtgctggtctgtgtgctggcccatcactttggcaaagaattgggattcg |
| | | | aaccggtgccgccaccATGGACTGGACCTGGAGGTTCCTCTTTGTGGTGGCAGCAGCT |
| | | | ACAGGTGTCCAGTCCgaggttcagctggtggagtctggcggtggcctggtgcagccag |
| | | | ggggctcactccgtttgtcctgtgcagcttctggcttcaacattaaagacacctatat |
| | | | acactgggtgcgtcaggccccgggtaagggcctggaatgggttgcaaggatttatcct |
| | | | acgaatggttatactagatatgccgatagcgtcaagggccgtttcactataagcgcag |
| | | | acacatccaaaaacacagcctacctgcagatgaacagcctgcgtgctgaggacactgc |
| | | | cgtctattattgttctagatggggaggggacggcttctatgctatggacTACtggggt |
| | | | caaggaaccctggtcaccgtctcctcggcgtcgaccaagggcccatcggtcttccccc |
| | | | tggcaccctcctccaagagcacctctgggggcacagcggccctgggctgcctggtcaa |
| | | | ggactacttccccgaacctgtgacggtctcgtggaactcaggcgccctgaccagcggc |
| | | | gtgcacaccttcccggctgtcctacagtcctcaggactctactccctcagcagcgtgg |
| | | | tgaccgtgccctccagcagcttgggcacccagacctacatctgcaacgtgaatcacaa |
| | | | gcccagcaacaccaaggtggacaagaaagttgagcccCCCaaatcttgtgacaaaact |
| | | | cacacatgcccaccgtgcccagcacctgaactcctggggggaccgtcagtcttcctct |
| | | | tccccccaaaacccaaggacaccctcatgGCAtcccggacccctgaggtcacatgcgt |
| | | | ggtggtggacgtgagccacgaagaccctgaggtcaagttcaactggtacgtggacggc |
| | | | gtggaggtgcataatgccaagacaaagccgcgggaggagcagtacaacagcacgtacc |
| | | | gtgtggtcagcgtcctcaccgtcctgcaccaggactggctgaatggcaaggagtacaa |
| | | | gtgcaaggtctccaacaaagccctcccagcccccatcgagaaaaccatctccaaagcc |
| | | | aaagggcagccccgagaaccacaggtgtacaccctgcccccatcccgggatgagctga |
| | | | ccaagaaccaggtcagcctgacctgcctggtcaaaggcttctatcccagcgacatcgc |
| | | | cgtggagtgggagagcaatgggcagccggagaacaactacaagaccacgcctcccgtg |
| | | | ctggactccgacggctccttcttcctctacagcaagctcaccgtggacaagagcaggt |
| | | | ggcagcaggggaacgtcttctcatgctccgtgatgcatgaggctctgcacaacCAGta |
| | | | cacgcagaagagcctctccctgtctccgggtaaaagaaagaggcgagagggcagagga |
| | | | agtcttctaacatgcggtgacgtggaggagaatcccggccctATGGACATGAGGGTCC |
| | | | CTGCTCAGCTCCTGGGGCTCCTGCTGCTCTGGCTCTCAGGTGCCAGATGTgatatcca |
| | | | gatgacccagtccccgagctccctgtccgcctctgtgggcgatagggtcaccatcacc |
| | | | tgccgtgccagtcaggatgtgaatactgctgtagcctggtatcaacagaaaccaggaa |
| | | | aagctccgaaactactgatttactcggcatccttcctcTACtctggagtcccttctcg |
| | | | cttctctggatccagatctgggacggatttcactctgaccatcagcagtctgcagccg |
| | | | gaagacttcgcaacttattactgtcagcaacattatactactcctcccacgttcggac |
| | | | agggtaccaaggtggagatcaaacgaactgtggctgcaccatctgtcttcatcttccc |
| | | | gccatctgatgagcagttgaaatctggaactgcctctgttgtgtgcctgctgaataac |
| | | | ttctatcccagagaggccaaagtacagtggaaggtggataacgccctccaatcgggta |
| | | | actcccaggagagtgtcacagagcaggacagcaaggacagcacctacagcctcagcag |
| | | | caccctgacgctgagcaaagcagactacgagaaacacaaagtctacgcctgcgaagtc |
| | | | acccatcagggcctgagctcgcccgtcacaaagagcttcaacaggggagagtgttagt |
| | | | agtaactcgaggacggggtgaactacgcctgaggatccgatctttttccctctgccaa |
| | | | aaattatggggacatcatgaagccccttgagcatctgacttctggctaataaaggaaa |
| | | | tttattttcattgcaatagtgtgttggaattttttgtgtctctcactcggcctaggta |
| | | | gataagtagcatggcgggttaatcattaactacaaggaacccctagtgatggagttgg |
| | | | ccactccctctctgcgcgctcgctcgctcactgaggccgggcgaccaaaggtcgcccg |
| | | | acgcccgggctttgcccgggcggcctcagtgagcgagcgagcgcgcag |
| HER-47 | 3992 | 5167 | ctgcgcgctcgctcgctcactgaggccgcccgggcaaagcccgggcgtcgggcgacct |
| | | | ttggtcgcccggcctcagtgagcgagcgagcgcgcagagagggagtggccaactccat |
| | | | cactaggggttccttgtagttaatgattaacccgccatgctacttatctaccagggta |
| | | | atggggatcctctagaactatagctagtcGACATTGATTATTGACTAGTTATTAATAG |
| | | | TAATCAATTACGGGGTCATTAGTTCATAGCCCATATATGGAGTTCCGCGTTACATAAC |
| | | | TTACGGTAAATGGCCCGCCTGGCTGACCGCCCAACGACCCCCGCCCATTGACGTCAAT |
| | | | AATGACGTATGTTCCCATAGTAACGCCAATAGGGACTTTCCATTGACGTCAATGGGTG |
| | | | GAGTATTTACGGTAAACTGCCCACTTGGCAGTACATCAAGTGTATCATATGCCAAGTA |
| | | | CGCCCCCTATTGACGTCAATGACGGTAAATGGCCCGCCTGGCATTATGCCCAGTACAT |
| | | | GACCTTATGGGACTTTCCTACTTGGCAGTACATCTACGTATTAGTCATCGCTATTACC |
| | | | ATGtcgaggccacgttctgcttcactctccccatctcccccccctccccacccccaat |
| | | | tttgtatttatttattttttaattattttgtgcagcgatgggggcggggggggggggc |
| | | | gcgcgccaggcggggcggggcggggcgaggggcggggcggggcgaggcggagaggtgc |
| | | | ggcggcagccaatcagagcggcgcgctccgaaagtttccttttatggcgaggcggcgg |
| | | | cggcggcggccctataaaaagcgaagcgcgcggcgggcgggagcaagcttcgtttagt |
| | | | gaaccgtcagatcgcctggagacgccatccacgctgttttgacctccatagaagacac |
| | | | cgggaccgatccagcctccgcggattcgaatcccggccgggaacggtgcattggaacg |
| | | | cggattccccgtgccaagagtgacgtaagtaccgcctatagagtctataggcccacaa |
| | | | aaaatgctttcttcttttaatatactttttttgttatcttatttctaatactttccct |
| | | | aatctctttctttcagggcaataatgatacaatgtatcatgcctctttgcaccattct |
| | | | aaagaataacagtgataatttctgggttaaggcaatagcaatatttctgcatataaat |
| | | | atttctgcatataaattgtaactgatgtaagaggtttcatattgctaatagcagctac |
| | | | aatccagctaccattctgcttttattttatggttgggataaggctggattattctgag |
| | | | tccaagctaggcccttttgctaatcatgttcatacctcttatcttcctcccacagctc |
| | | | ctgggcaacgtgctggtctgtgtgctggcccatcactttggcaaagaattgggattcg |
| | | | aaccggtgccgccaccATGGACTGGACCTGGAGGTTCCTCTTTGTGGTGGCAGCAGCT |
| | | | ACAGGTGTCCAGTCCgaggttcagctggtggagtctggcggtggcctggtgcagccag |
| | | | ggggctcactccgtttgtcctgtgcagcttctggcttcaacattaaagacacctatat |
| | | | acactgggtgcgtcaggccccgggtaagggcctggaatgggttgcaaggatttatcct |
| | | | acgaatggttatactagatatgccgatagcgtcaagggccgtttcactataagcgcag |
| | | | acacatccaaaaacacagcctacctgcagatgaacagcctgcgtgctgaggacactgc |
| | | | cgtctattattgttctagatggggaggggacggcttctatgctatggacTACtggggt |
| | | | caaggaaccctggtcaccgtctcctcggcgtcgaccaagggcccatcggtcttccccc |
| | | | tggcaccctcctccaagagcacctctgggggcacagcggccctgggctgcctggtcaa |
| | | | ggactacttccccgaacctgtgacggtctcgtggaactcaggcgccctgaccagcggc |
| | | | gtgcacaccttcccggctgtcctacagtcctcaggactctactccctcagcagcgtgg |
| | | | tgaccgtgccctccagcagcttgggcacccagacctacatctgcaacgtgaatcacaa |
| | | | gcccagcaacaccaaggtggacaagaaagttgagcccCCCaaatcttgtgacaaaact |
| | | | cacacatgcccaccgtgcccagcacctgaactcctggggggaccgtcagtcttcctct |
| | | | tccccccaaaacccaaggacaccctcatgGCAtcccggacccctgaggtcacatgcgt |
| | | | ggtggtggacgtgagccacgaagaccctgaggtcaagttcaactggtacgtggacggc |
| | | | gtggaggtgcataatgccaagacaaagccgcgggaggagcagtacaacagcacgtacc |
| | | | gtgtggtcagcgtcctcaccgtcctgGCCcaggactggctgaatggcaaggagtacaa |
| | | | gtgcaaggtctccaacaaagccctcccagcccccatcgagaaaaccatctccaaagcc |
| | | | aaagggcagccccgagaaccacaggtgtacaccctgcccccatcccgggatgagctga |
| | | | ccaagaaccaggtcagcctgacctgcctggtcaaaggcttctatcccagcgacatcgc |
| | | | cgtggagtgggagagcaatgggcagccggagaacaactacaagaccacgcctcccgtg |
| | | | ctggactccgacggctccttcttcctctacagcaagctcaccgtggacaagagcaggt |
| | | | ggcagcaggggaacgtcttctcatgctccgtgatgcatgaggctctgcacaacGCTta |
| | | | cacgcagaagagcctctccctgtctccgggtaaaAgaaagaggcgagagggcagagga |
| | | | agtcttctaacatgcggtgacgtggaggagaatcccggccctATGGACATGAGGGTCC |
| | | | CTGCTCAGCTCCTGGGGCTCCTGCTGCTCTGGCTCTCAGGTGCCAGATGTgatatcca |
| | | | gatgacccagtccccgagctccctgtccgcctctgtgggcgatagggtcaccatcacc |
| | | | tgccgtgccagtcaggatgtgaatactgctgtagcctggtatcaacagaaaccaggaa |
| | | | aagctccgaaactactgatttactcggcatccttcctcTACtctggagtcccttctcg |
| | | | cttctctggatccagatctgggacggatttcactctgaccatcagcagtctgcagccg |
| | | | gaagacttcgcaacttattactgtcagcaacattatactactcctcccacgttcggac |
| | | | agggtaccaaggtggagatcaaacgaactgtggctgcaccatctgtcttcatcttccc |
| | | | gccatctgatgagcagttgaaatctggaactgcctctgttgtgtgcctgctgaataac |
| | | | ttctatcccagagaggccaaagtacagtggaaggtggataacgccctccaatcgggta |
| | | | actcccaggagagtgtcacagagcaggacagcaaggacagcacctacagcctcagcag |
| | | | caccctgacgctgagcaaagcagactacgagaaacacaaagtctacgcctgcgaagtc |
| | | | acccatcagggcctgagctcgcccgtcacaaagagcttcaacaggggagagtgttagt |
| | | | agtaactcgaggacggggtgaactacgcctgaggatccgatctttttccctctgccaa |
| | | | aaattatggggacatcatgaagccccttgagcatctgacttctggctaataaaggaaa |
| | | | tttattttcattgcaatagtgtgttggaattttttgtgtctctcactcggcctaggta |
| | | | gataagtagcatggcgggttaatcattaactacaaggaacccctagtgatggagttgg |
| | | | ccactccctctctgcgcgctcgctcgctcactgaggccgggcgaccaaaggtcgcccg |
| | | | acgcccgggctttgcccgggcggcctcagtgagcgagcgagcgcgcag |
| HER-53 | 3989 | 5168 | ctgcgcgctcgctcgctcactgaggccgcccgggcaaagcccgggcgtcgggcgacct |
| | | | ttggtcgcccggcctcagtgagcgagcgagcgcgcagagagggagtggccaactccat |
| | | | cactaggggttccttgtagttaatgattaacccgccatgctacttatctaccagggta |
| | | | atggggatcctctagaactatagctagtcGACATTGATTATTGACTAGTTATTAATAG |
| | | | TAATCAATTACGGGGTCATTAGTTCATAGCCCATATATGGAGTTCCGCGTTACATAAC |
| | | | TTACGGTAAATGGCCCGCCTGGCTGACCGCCCAACGACCCCCGCCCATTGACGTCAAT |
| | | | AATGACGTATGTTCCCATAGTAACGCCAATAGGGACTTTCCATTGACGTCAATGGGTG |
| | | | GAGTATTTACGGTAAACTGCCCACTTGGCAGTACATCAAGTGTATCATATGCCAAGTA |
| | | | CGCCCCCTATTGACGTCAATGACGGTAAATGGCCCGCCTGGCATTATGCCCAGTACAT |
| | | | GACCTTATGGGACTTTCCTACTTGGCAGTACATCTACGTATTAGTCATCGCTATTACC |
| | | | ATGtcgaggccacgttctgcttcactctccccatctcccccccctccccacccccaat |
| | | | tttgtatttatttattttttaattattttgtgcagcgatgggggcggggggggggggc |
| | | | gcgcgccaggcggggcggggcggggcgaggggcggggcggggcgaggcggagaggtgc |
| | | | ggcggcagccaatcagagcggcgcgctccgaaagtttccttttatggcgaggcggcgg |
| | | | cggcggcggccctataaaaagcgaagcgcgcggcgggcgggagcaagcttcgtttagt |
| | | | gaaccgtcagatcgcctggagacgccatccacgctgttttgacctccatagaagacac |
| | | | cgggaccgatccagcctccgcggattcgaatcccggccgggaacggtgcattggaacg |
| | | | cggattccccgtgccaagagtgacgtaagtaccgcctatagagtctataggcccacaa |
| | | | aaaatgctttcttcttttaatatacttttttgtttatcttatttctaatactttccct |
| | | | aatctctttctttcagggcaataatgatacaatgtatcatgcctctttgcaccattct |
| | | | aaagaataacagtgataatttctgggttaaggcaatagcaatatttctgcatataaat |
| | | | atttctgcatataaattgtaactgatgtaagaggtttcatattgctaatagcagctac |
| | | | aatccagctaccattctgcttttattttatggttgggataaggctggattattctgag |
| | | | tccaagctaggcccttttgctaatcatgttcatacctcttatcttcctcccacagctc |
| | | | ctgggcaacgtgctggtctgtgtgctggcccatcactttggcaaagaattgggattcg |
| | | | aaccggtgccgccaccATGGACTGGACCTGGAGGTTCCTCTTTGTGGTGGCAGCAGCT |
| | | | ACAGGTGTCCAGTCCgaggttcagctggtggagtctggcggtggcctggtgcagccag |
| | | | ggggctcactccgtttgtcctgtgcagcttctggcttcaacattaaagacacctatat |
| | | | acactgggtgcgtcaggccccgggtaagggcctggaatgggttgcaaggatttatcct |
| | | | acgaatggttatactagatatgccgatagcgtcaagggccgtttcactataagcgcag |
| | | | acacatccaaaaacacagcctacctgcagatgaacagcctgcgtgctgaggacactgc |
| | | | cgtctattattgttctagatggggaggggacggcttctatgctatggacTACtggggt |
| | | | caaggaaccctggtcaccgtctcctcggcgtcgaccaagggcccatcggtcttccccc |
| | | | tggcaccctcctccaagagcacctctgggggcacagcggccctgggctgcctggtcaa |
| | | | ggactacttccccgaacctgtgacggtctcgtggaactcaggcgccctgaccagcggc |
| | | | gtgcacaccttcccggctgtcctacagtcctcaggactctactccctcagcagcgtgg |
| | | | tgaccgtgccctccagcagcttgggcacccagacctacatctgcaacgtgaatcacaa |
| | | | gcccagcaacaccaaggtggacaagaGagttgagcccaaatcttgtgacaaaactcac |
| | | | acatgcccaccgtgcccagcacctgaactcGtggggggaccgtcagtcttcctcCtcc |
| | | | ccccaaaacccaaggacaccctcatgatctcccggacccctgaggtcacatgcgtggt |
| | | | ggtggacgtgagccacgaagaccctgaggtcaagttcaactggtacgtggacggcgtg |
| | | | gaggtgcataatgccaagacaaagccgcCggaggagcagtacaacagcacgCTccgtg |
| | | | tggtcagcgtcctcaccgtcctgcaccaggactggctgaatggcaaggagtacaagtg |
| | | | caaggtctccaacaaagccctcccagcccccatcgagaaaaccatctccaaagccaaa |
| | | | gggcagccccgagaaccacaggtgtacaccctgcccccatcccgggaTgagCtgacca |
| | | | agaaccaggtcagcctgacctgcctggtcaaaggcttctatcccagcgacatcgccgt |
| | | | ggagtgggagagcaatgggcagccggagaacaactacaagaccacgcctcTcgtgctg |
| | | | gactccgacggctccttcttcctctacagcaagctcaccgtggacaagagcaggtggc |
| | | | agcaggggaacgtcttctcatgctccgtgatgcatgaggctctgcacaaccactacac |
| | | | gcagaagagcctctccctgtctccgggtaaaAgaaagaggcgagagggcagaggaagt |
| | | | cttctaacatgcggtgacgtggaggagaatcccggccctATGGACATGAGGGTCCCTG |
| | | | CTCAGCTCCTGGGGCTCCTGCTGCTCTGGCTCTCAGGTGCCAGATGTgatatccagat |
| | | | gacccagtccccgagctccctgtccgcctctgtgggcgatagggtcaccatcacctgc |
| | | | cgtgccagtcaggatgtgaatactgctgtagcctggtatcaacagaaaccaggaaaag |
| | | | ctccgaaactactgatttactcggcatccttcctcTACtctggagtcccttctcgctt |
| | | | ctctggatccagatctgggacggatttcactctgaccatcagcagtctgcagccggaa |
| | | | gacttcgcaacttattactgtcagcaacattatactactcctcccacgttcggacagg |
| | | | gtaccaaggtggagatcaaacgaactgtggctgcaccatctgtcttcatcttcccgcc |
| | | | atctgatgagcagttgaaatctggaactgcctctgttgtgtgcctgctgaataacttc |
| | | | tatcccagagaggccaaagtacagtggaaggtggataacgccctccaatcgggtaact |
| | | | cccaggagagtgtcacagagcaggacagcaaggacagcacctacagcctcagcagcac |
| | | | cctgacgctgagcaaagcagactacgagaaacacaaagtctacgcctgcgaagtcacc |
| | | | catcagggcctgagctcgcccgtcacaaagagcttcaacaggggagagtgttagtagt |
| | | | aactcgaggacggggtgaactacgcctgaggatccgatctttttccctctgccaaaaa |
| | | | ttatggggacatcatgaagccccttgagcatctgacttctggctaataaaggaaattt |
| | | | attttcattgcaatagtgtgttggaattttttgtgtctctcactcggcctaggtagat |
| | | | aagtagcatggcgggttaatcattaactacaaggaacccctagtgatggagttggcca |
| | | | ctccctctctgcgcgctcgctcgctcactgaggccgggcgaccaaaggtcgcccgacg |
| | | | cccgggctttgcccgggcggcctcagtgagcgagcgagcgcgcag |
| HER-57 | 3287 | 5187 | ctgcgcgctcgctcgctcactgaggccgcccgggcaaagcccgggcgtcgggcgacct |
| | | | ttggtcgcccggcctcagtgagcgagcgagcgcgcagagagggagtggccaactccat |
| | | | cactaggggttccttgtagttaatgattaacccgccatgctacttatctaccagggta |
| | | | atggggatcctctagaactatagctagtcgacattgattattgactagttattaatag |
| | | | taatcaattacggggtcattagttcatagcccatatatggagttccgcgttacataac |
| | | | ttacggtaaatggcccgcctggctgaccgcccaacgacccccgcccattgacgtcaat |
| | | | aatgacgtatgttcccatagtaacgccaatagggactttccattgacgtcaatgggtg |
| | | | gagtatttacggtaaactgcccacttggcagtacatcaagtgtatcatatgccaagta |
| | | | cgccccctattgacgtcaatgacggtaaatggcccgcctggcattatgcccagtacat |
| | | | gaccttatgggactttcctacttggcagtacatctacgtattagtcatcgctattacc |
| | | | atgtcgaggccacgttctgcttcactctccccatctcccccccctccccacccccaat |
| | | | tttgtatttatttattttttaattattttgtgcagcgatgggggcggggggggggggc |
| | | | gcgcgccaggcggggcggggcggggcgaggggcggggcggggcgaggcggagaggtgc |
| | | | ggcggcagccaatcagagcggcgcgctccgaaagtttccttttatggcgaggcggcgg |
| | | | cggcggcggccctataaaaagcgaagcgcgcggcgggcgggagcaagcttcgtttagt |
| | | | gaaccgtcagatcgcctggagacgccatccacgctgttttgacctccatagaagacac |
| | | | cgggaccgatccagcctccgcggattcgaatcccggccgggaacggtgcattggaacg |
| | | | cggattccccgtgccaagagtgacgtaagtaccgcctatagagtctataggcccacaa |
| | | | aaaatgctttcttcttttaatatacttttttgtttatcttatttctaatactttccct |
| | | | aatctctttctttcagggcaataatgatacaatgtatcatgcctctttgcaccattct |
| | | | aaagaataacagtgataatttctgggttaaggcaatagcaatatttctgcatataaat |
| | | | atttctgcatataaattgtaactgatgtaagaggtttcatattgctaatagcagctac |
| | | | aatccagctaccattctgcttttattttatggttgggataaggctggattattctgag |
| | | | tccaagctaggcccttttgctaatcatgttcatacctcttatcttcctcccacagctc |
| | | | ctgggcaacgtgctggtctgtgtgctggcccatcactttggcaaagaattgggattcg |
| | | | aaccggtgccgccaccATGGACTGGACCTGGAGGTTCCTCTTTGTGGTGGCAGCAGCT |
| | | | ACAGGTGTCCAGTCCgaggttcagctggtggagtctggcggtggcctggtgcagccag |
| | | | ggggctcactccgtttgtcctgtgcagcttctggcttcaacattaaagacacctatat |
| | | | acactgggtgcgtcaggccccgggtaagggcctggaatgggttgcaaggatttatcct |
| | | | acgaatggttatactagatatgccgatagcgtcaagggccgtttcactataagcgcag |
| | | | acacatccaaaaacacagcctacctgcagatgaacagcctgcgtgctgaggacactgc |
| | | | cgtctattattgttctagatggggaggggacggcttctatgctatggacTACtggggt |
| | | | caaggaaccctggtcaccgtctcctcgggtggtggtggatccggaggaggaggaAGTg |
| | | | gaggtggaggtTCTgatatccagatgacccagtccccgagctccctgtccgcctctgt |
| | | | gggcgatagggtcaccatcacctgccgtgccagtcaggatgtgaatactgctgtagcc |
| | | | tggtatcaacagaaaccaggaaaagctccgaaactactgatttactcggcatccttcc |
| | | | tcTACtctggagtcccttctcgcttctctggatccagatctgggacggatttcactct |
| | | | gaccatcagcagtctgcagccggaagacttcgcaacttattactgtcagcaacattat |
| | | | actactcctcccacgttcggacagggtaccaaggtggagatcaaagagcccaaatctt |
| | | | gtgacaaaactTACacatgcccaccgtgcccagcacctgaactcGtggggggaccgtc |
| | | | agtcttcctcCtccccccaaaacccaaggacaccctcatgatctcccggacccctgag |
| | | | gtcacatgcgtggtggtggacgtgagccacgaagaccctgaggtcaagttcaactggt |
| | | | acgtggacggcgtggaggtgcataatgccaagacaaagccgcCggaggagcagtacaa |
| | | | cagcacgCTccgtgtggtcagcgtcctcaccgtcctgcaccaggactggctgaatggc |
| | | | aaggagtacaagtgcaaggtctccaacaaagccctcccagcccccatcgagaaaacca |
| | | | tctccaaagccaaagggcagccccgagaaccacaggtgtacaccctgcccccatcccg |
| | | | ggaTgagCtgaccaagaaccaggtcagcctgacctgcctggtcaaaggcttctatccc |
| | | | agcgacatcgccgtggagtgggagagcaatgggcagccggagaacaactacaagacca |
| | | | cgcctcTcgtgctggactccgacggctccttcttcctctacagcaagctcaccgtgga |
| | | | caagagcaggtggcagcaggggaacgtcttctcatgctccgtgatgcatgaggctctg |
| | | | cacaaccactacacgcagaagagcctctccctgtctccgggtaaatagtagtaactcg |
| | | | aggacggggtgaactacgcctgaggatccgatctttttccctctgccaaaaattatgg |
| | | | ggacatcatgaagccccttgagcatctgacttctggctaataaaggaaatttattttc |
| | | | attgcaatagtgtgttggaattttttgtgtctctcactcggcctaggtagataagtag |
| | | | catggcgggttaatcattaactacaaggaacccctagtgatggagttggccactccct |
| | | | ctctgcgcgctcgctcgctcactgaggccgggcgaccaaaggtcgcccgacgcccggg |
| | | | ctttgcccgggcggcctcagtgagcgagcgagcgcgcag |
| HER-62 | 3284 | 5188 | ctgcgcgctcgctcgctcactgaggccgcccgggcaaagcccgggcgtcgggcgacct |
| | | | ttggtcgcccggcctcagtgagcgagcgagcgcgcagagagggagtggccaactccat |
| | | | cactaggggttccttgtagttaatgattaacccgccatgctacttatctaccagggta |
| | | | atggggatcctctagaactatagctagtcgacattgattattgactagttattaatag |
| | | | taatcaattacggggtcattagttcatagcccatatatggagttccgcgttacataac |
| | | | ttacggtaaatggcccgcctggctgaccgcccaacgacccccgcccattgacgtcaat |
| | | | aatgacgtatgttcccatagtaacgccaatagggactttccattgacgtcaatgggtg |
| | | | gagtatttacggtaaactgcccacttggcagtacatcaagtgtatcatatgccaagta |
| | | | cgccccctattgacgtcaatgacggtaaatggcccgcctggcattatgcccagtacat |
| | | | gaccttatgggactttcctacttggcagtacatctacgtattagtcatcgctattacc |
| | | | atgtcgaggccacgttctgcttcactctccccatctcccccccctccccacccccaat |
| | | | tttgtatttatttattttttaattattttgtgcagcgatgggggcggggggggggggc |
| | | | gcgcgccaggcggggcggggcggggcgaggggcggggcggggcgaggcggagaggtgc |
| | | | ggcggcagccaatcagagcggcgcgctccgaaagtttccttttatggcgaggcggcgg |
| | | | cggcggcggccctataaaaagcgaagcgcgcggcgggcgggagcaagcttcgtttagt |
| | | | gaaccgtcagatcgcctggagacgccatccacgctgttttgacctccatagaagacac |
| | | | cgggaccgatccagcctccgcggattcgaatcccggccgggaacggtgcattggaacg |
| | | | cggattccccgtgccaagagtgacgtaagtaccgcctatagagtctataggcccacaa |
| | | | aaaatgctttcttcttttaatatacttttttgtttatcttatttctaatactttccct |
| | | | aatctctttctttcagggcaataatgatacaatgtatcatgcctctttgcaccattct |
| | | | aaagaataacagtgataatttctgggttaaggcaatagcaatatttctgcatataaat |
| | | | atttctgcatataaattgtaactgatgtaagaggtttcatattgctaatagcagctac |
| | | | aatccagctaccattctgcttttattttatggttgggataaggctggattattctgag |
| | | | tccaagctaggcccttttgctaatcatgttcatacctcttatcttcctcccacagctc |
| | | | ctgggcaacgtgctggtctgtgtgctggcccatcactttggcaaagaattgggattcg |
| | | | aaccggtgccgccaccATGGACTGGACCTGGAGGTTCCTCTTTGTGGTGGCAGCAGCT |
| | | | ACAGGTGTCCAGTCCgaggttcagctggtggagtctggcggtggcctggtgcagccag |
| | | | ggggctcactccgtttgtcctgtgcagcttctggcttcaCcTTCaCCgacTATACCAT |
| | | | GGATtgggtgcgtcaggccccgggtaagggcctggaatgggttgcaGACGTGAATcct |
| | | | AATTCTggtGGTTCTATAtatAATCAGCGTTTCaagggccgtttcactCTGagcGTTg |
| | | | acCGTtccaaaaacacaCTGtacctgcagatgaacagcctgcgtgctgaggacactgc |
| | | | cgtctattattgtGCAagaAATCTGgggCCTAGCttctatTTCgacTACtggggtcaa |
| | | | ggaaccctggtcaccgtctcctcgggtggtggtggatccggaggaggaggaAGTggag |
| | | | gtggaggtTCTgatatccagatgacccagtccccgagctccctgtccgcctctgtggg |
| | | | cgatagggtcaccatcacctgcAAAgccagtcaggatgtgTCCATTGGGgtagcctgg |
| | | | tatcaacagaaaccaggaaaagctccgaaactactgatttactcggcatccTATCGCT |
| | | | ACACGggagtcccttctcgcttctctggatccGGTtctgggacggatttcactctgac |
| | | | catcagcagtctgcagccggaagacttcgcaacttattactgtcagcaaTACtatATC |
| | | | TATcctTACacgttcggacagggtaccaaggtggagatcaaagagcccaaatcttgtg |
| | | | acaaaactTACacatgcccaccgtgcccagcacctgaactcGtggggggaccgtcagt |
| | | | cttcctcCtccccccaaaacccaaggacaccctcatgatctcccggacccctgaggtc |
| | | | acatgcgtggtggtggacgtgagccacgaagaccctgaggtcaagttcaactggtacg |
| | | | tggacggcgtggaggtgcataatgccaagacaaagccgcCggaggagcagtacaacag |
| | | | cacgCTccgtgtggtcagcgtcctcaccgtcctgcaccaggactggctgaatggcaag |
| | | | gagtacaagtgcaaggtctccaacaaagccctcccagcccccatcgagaaaaccatct |
| | | | ccaaagccaaagggcagccccgagaaccacaggtgtacaccctgcccccatcccggga |
| | | | TgagCtgaccaagaaccaggtcagcctgacctgcctggtcaaaggcttctatcccagc |
| | | | gacatcgccgtggagtgggagagcaatgggcagccggagaacaactacaagaccacgc |
| | | | ctcTcgtgctggactccgacggctccttcttcctctacagcaagctcaccgtggacaa |
| | | | gagcaggtggcagcaggggaacgtcttctcatgctccgtgatgcatgaggctctgcac |
| | | | aaccactacacgcagaagagcctctccctgtctccgggtaaatagtagtaactcgagg |
| | | | acggggtgaactacgcctgaggatccgatctttttccctctgccaaaaattatgggga |
| | | | catcatgaagccccttgagcatctgacttctggctaataaaggaaatttattttcatt |
| | | | gcaatagtgtgttggaattttttgtgtctctcactcggcctaggtagataagtagcat |
| | | | ggcgggttaatcattaactacaaggaacccctagtgatggagttggccactccctctc |
| | | | tgcgcgctcgctcgctcactgaggccgggcgaccaaaggtcgcccgacgcccgggctt |
| | | | tgcccgggcggcctcagtgagcgagcgagcgcgcag |
| HER-69 | 4047 | 5169 | ctgcgcgctcgctcgctcactgaggccgcccgggcaaagcccgggcgtcgggcgacct |
| | | | ttggtcgcccggcctcagtgagcgagcgagcgcgcagagagggagtggccaactccat |
| | | | cactaggggttccttgtagttaatgattaacccgccatgctacttatctaccagggta |
| | | | atggggatcctctagaactatagctagtcgacataacgcgtgatctaacatatcctgg |
| | | | tgtggagtagcggacgctgctatgacagaggctcgggggcctgagctggctctgtgag |
| | | | ctggggaggaggcagacagccaggccttgtctgcaagcagacctggcagcattgggct |
| | | | ggccgccccccagggcctcctcttcatgcccagtgaatgactcaccttggcacagaca |
| | | | caatgttcggggtgggcacagtgcctgcttcccgccgcaccccagcccccctcaaatg |
| | | | ccttccgagaagcccattgagcagggggcttgcattgcaccccagcctgacagcctgg |
| | | | catcttgggataaaagcagcacagccccctaggggctgcccttgctgtgtggcgccac |
| | | | cggcggtggagaacaaggctctattcagcctgtgcccaggaaaggggatcaggggatg |
| | | | cccaggcatggacagtgggtggcagggggggagaggagggctgtctgcttcccagaag |
| | | | tccaaggacacaaatgggtgaggggagagctctccccatagctgggctgcggcccaac |
| | | | cccaccccctcaggctatgccagggggtgttgccaggggcacccgggcatcgccagtc |
| | | | tagcccactccttcataaagccctcgcatcccaggagcgagcagagccagagcaggtt |
| | | | ggagaggagacgcatcacctccgctgctcgcggggatcctctagaagcttcgtttagt |
| | | | gaaccgtcagatcgcctggagacgccatccacgctgttttgacctccatagaagacac |
| | | | cgggaccgatccagcctccgcggattcgaatcccggccgggaacggtgcattggaacg |
| | | | cggattccccgtgccaagagtgacgtaagtaccgcctatagagtctataggcccacaa |
| | | | aaaatgctttcttcttttaatatacttttttgtttatcttatttctaatactttccct |
| | | | aatctctttctttcagggcaataatgatacaatgtatcatgcctctttgcaccattct |
| | | | aaagaataacagtgataatttctgggttaaggcaatagcaatatttctgcatataaat |
| | | | atttctgcatataaattgtaactgatgtaagaggtttcatattgctaatagcagctac |
| | | | aatccagctaccattctgcttttattttatggttgggataaggctggattattctgag |
| | | | tccaagctaggcccttttgctaatcatgttcatacctcttatcttcctcccacagctc |
| | | | ctgggcaacgtgctggtctgtgtgctggcccatcactttggcaaagaattgggattcg |
| | | | aaccggtgccgccaccATGGACTGGACCTGGAGGTTCCTCTTTGTGGTGGCAGCAGCT |
| | | | ACAGGTGTCCAGTCCCAGGTGCAGCTGCAGCAGAGCGGCCCCGAGCTGGTGAAGCCCG |
| | | | GCGCCAGCCTGAAGCTGAGCTGCACCGCCAGCGGCTTCAACATCAAGGACACCTACAT |
| | | | CCACTGGGTGAAGCAGAGACCCGAGCAGGGCCTGGAGTGGATCGGCAGAATCTACCCC |
| | | | ACCAACGGCTACACCAGATACGACCCCAAGTTCCAGGACAAGGCCACCATCACCGCCG |
| | | | ACACCAGCAGCAACACCGCCTACCTGCAGGTGAGCAGACTGACCAGCGAGGACACCGC |
| | | | CGTGTACTACTGCAGCAGATGGGGCGGCGACGGCTTCTACGCCATGGACTACTGGGGC |
| | | | CAGGGCGCCAGCGTGACCGTGAGCAGCgcgtcgaccaagggcccatcggtcttccccc |
| | | | tggcaccctcctccaagagcacctctgggggcacagcggccctgggctgcctggtcaa |
| | | | ggactacttccccgaacctgtgacggtctcgtggaactcaggcgccctgaccagcggc |
| | | | gtgcacaccttcccggctgtcctacagtcctcaggactctactccctcagcagcgtgg |
| | | | tgaccgtgccctccagcagcttgggcacccagacctacatctgcaacgtgaatcacaa |
| | | | gcccagcaacaccaaggtggacaagaGagttgagcccaaatcttgtgacaaaactcac |
| | | | acatgcccaccgtgcccagcacctgaactcGtggggggaccgtcagtcttcctcCtcc |
| | | | ccccaaaacccaaggacaccctcatgatctcccggacccctgaggtcacatgcgtggt |
| | | | ggtggacgtgagccacgaagaccctgaggtcaagttcaactggtacgtggacggcgtg |
| | | | gaggtgcataatgccaagacaaagccgcCggaggagcagtacaacagcacgCTccgtg |
| | | | tggtcagcgtcctcaccgtcctgcaccaggactggctgaatggcaaggagtacaagtg |
| | | | caaggtctccaacaaagccctcccagcccccatcgagaaaaccatctccaaagccaaa |
| | | | gggcagccccgagaaccacaggtgtacaccctgcccccatcccgggaTgagCtgacca |
| | | | agaaccaggtcagcctgacctgcctggtcaaaggcttctatcccagcgacatcgccgt |
| | | | ggagtgggagagcaatgggcagccggagaacaactacaagaccacgcctcTcgtgctg |
| | | | gactccgacggctccttcttcctctacagcaagctcaccgtggacaagagcaggtggc |
| | | | agcaggggaacgtcttctcatgctccgtgatgcatgaggctctgcacaaccactacac |
| | | | gcagaagagcctctccctgtctccgggtaaaagaaagaggcgagagggcagaggaagt |
| | | | cttctaacatgcggtgacgtggaggagaatcccggccctATGGACATGAGGGTCCCTG |
| | | | CTCAGCTCCTGGGGCTCCTGCTGCTCTGGCTCTCAGGTGCCAGATGTGACATCGTGAT |
| | | | GACCCAGAGCCACAAGTTCATGAGCACCAGCGTGGGCGACAGAGTGAGCATCACCTGC |
| | | | AAGGCCAGCCAGGACGTGAACACCGCCGTGGCCTGGTACCAGCAGAAGCCCGGCCACA |
| | | | GCCCCAAGCTGCTGATCTACAGCGCCAGCTTCAGATACACCGGCGTGCCGGACAGATT |
| | | | CACCGGCAGCAGAAGCGGCACCGACTTCACCTTCACCATCAGCAGCGTGCAGGCCGAG |
| | | | GACCTGGCCGTGTACTACTGCCAGCAGCACTACACCACCCCTCCTACCTTCGGCGGCG |
| | | | GCACCAAGGTGGAGATCAAGAGAACCGTGGCCGCCCCTAGCGTGTTCATCTTCCCGCC |
| | | | AAGCGACGAGCAGCTGAAGAGCGGCACCGCCAGCGTGGTGTGCCTGCTGAACAACTTC |
| | | | TACCCCAGAGAGGCCAAGGTGCAGTGGAAGGTGGACAACGCCCTGCAGAGCGGCAACA |
| | | | GCCAGGAGAGCGTGACCGAGCAGGACAGCAAGGACAGCACCTACAGCCTGAGCAGCAC |
| | | | CCTGACCCTGAGCAAGGCCGACTACGAGAAGCACAAGGTGTACGCCTGCGAGGTGACC |
| | | | CACCAGGGCCTGAGCAGCCCCGTGACCAAGAGCTTCAACAGAGGCGAGTGCtagtagt |
| | | | aactcgaggacggggtgaactacgcctgaggatccgatctttttccctctgccaaaaa |
| | | | ttatggggacatcatgaagccccttgagcatctgacttctggctaataaaggaaattt |
| | | | attttcattgcaatagtgtgttggaattttttgtgtctctcactcggcctaggtagat |
| | | | aagtagcatggcgggttaatcattaactacaaggaacccctagtgatggagttggcca |
| | | | ctccctctctgcgcgctcgctcgctcactgaggccgggcgaccaaaggtcgcccgacg |
| | | | cccgggctttgcccgggcggcctcagtgagcgagcgagcgcgcag |
| HER-73 | 4742 | 5189 | ctgcgcgctcgctcgctcactgaggccgcccgggcaaagcccgggcgtcgggcgacct |
| | | | ttggtcgcccggcctcagtgagcgagcgagcgcgcagagagggagtggccaactccat |
| | | | cactaggggttccttgtagttaatgattaacccgccatgctacttatctaccagggta |
| | | | atggggatcctctagaactatagctagtcgacattgattattgactagttattaatag |
| | | | taatcaattacggggtcattagttcatagcccatatatggagttccgcgttacataac |
| | | | ttacggtaaatggcccgcctggctgaccgcccaacgacccccgcccattgacgtcaat |
| | | | aatgacgtatgttcccatagtaacgccaatagggactttccattgacgtcaatgggtg |
| | | | gagtatttacggtaaactgcccacttggcagtacatcaagtgtatcatatgccaagta |
| | | | cgccccctattgacgtcaatgacggtaaatggcccgcctggcattatgcccagtacat |
| | | | gaccttatgggactttcctacttggcagtacatctacgtattagtcatcgctattacc |
| | | | atgtcgaggccacgttctgcttcactctccccatctcccccccctccccacccccaat |
| | | | tttgtatttatttattttttaattattttgtgcagcgatgggggcggggggggggggc |
| | | | gcgcgccaggcggggcggggcggggcgaggggcggggcggggcgaggcggagaggtgc |
| | | | ggcggcagccaatcagagcggcgcgctccgaaagtttccttttatggcgaggcggcgg |
| | | | cggcggcggccctataaaaagcgaagcgcgcggcgggcgggagcaagcttcgtttagt |
| | | | gaaccgtcagatcgcctggagacgccatccacgctgttttgacctccatagaagacac |
| | | | cgggaccgatccagcctccgcggattcgaatcccggccgggaacggtgcattggaacg |
| | | | cggattccccgtgccaagagtgacgtaagtaccgcctatagagtctataggcccacaa |
| | | | aaaatgctttcttcttttaatatacttttttgtttatcttatttctaatactttccct |
| | | | aatctctttctttcagggcaataatgatacaatgtatcatgcctctttgcaccattct |
| | | | aaagaataacagtgataatttctgggttaaggcaatagcaatatttctgcatataaat |
| | | | atttctgcatataaattgtaactgatgtaagaggtttcatattgctaatagcagctac |
| | | | aatccagctaccattctgcttttattttatggttgggataaggctggattattctgag |
| | | | tccaagctaggcccttttgctaatcatgttcatacctcttatcttcctcccacagctc |
| | | | ctgggcaacgtgctggtctgtgtgctggcccatcactttggcaaagaattgggattcg |
| | | | aaccggtgccgccaccATGGACTGGACCTGGAGGTTCCTCTTTGTGGTGGCAGCAGCT |
| | | | ACAGGTGTCCAGTCCCAAgttcagctggtgCAGtctggTGCAGAAGTTAAGAAGccag |
| | | | ggGCAtcaGTAAAGGTGTCCtgCAAGgcttctggcTACTCTTTCACTGGGTATTTCat |
| | | | aAATtgggtgAGAGAGgccccCGGCCAGggcctggaatggATGGGCCATattTCCTCC |
| | | | TCTTATGCAACTTCTACAtatAACCAGAAGTTTCAGggcAGAGTCactTTCACTGTGg |
| | | | acacatccAGCTCTacagcctacATGGAGCTGTCAagcctgAGATCTgaggacactgc |
| | | | agtctattattgtGTGagaAGTggaAACTAtGAAGAGTATgctatggacTACtggggt |
| | | | caaggaaccctggtcacAgtctcctcAgcCtcTaccaagggcccatcTgtcttccccc |
| | | | tggcaccctcctccaagagcacctctgggggcacagcAgccctgggctgcctggtcaa |
| | | | ggactacttcccTgaacctgtgacAgtctcTtggaactcaggGgccctgaccTCTggG |
| | | | gtgcacaccttcccAgctgtcctacagtcctcaggactctactccctcTCTTCTgtgg |
| | | | tgacAgtgccctccagcagcttgggcacccagacctacatctgcaaTgtgaatcacaa |
| | | | gcccagcaacaccaaggtggacaagaaagttgagcccCCCaaatcttgtgacaaaact |
| | | | cacacatgcccaccCtgcccagcacctgaactcctggggggaccCtcagtcttcctct |
| | | | tccccccaaaacccaaggacaccctcatgatctccAGAacccctgaggtcacatgTgt |
| | | | ggtggtggaTgtgagccaTgaagaccctgaggtcaagttcaactggtaTgtggaTggG |
| | | | gtggaggtgcataatgccaagacaaagccCAGAgaggagcagtacaacagcacCtacA |
| | | | GAgtggtcTCAgtcctcacTgtcctgcaccaggactggctgaatggcaaggagtacaa |
| | | | gtgcaaggtctccaacaaagccctcccagcccccatAgagaaaaccatctccaaagcc |
| | | | aaagggcagcccAGAgaaccacaggtgtacaccctgcccccatccAGAgatgagctga |
| | | | ccaagaaccaggtcagcctgacctgcctggtcaaaggcttctatcccTCTgacatTgc |
| | | | TgtggagtgggagagcaatgggcagccAgagaacaactacaagaccacCcctccAgtg |
| | | | ctggactcTgatggctccttcttcctctacagcaagctcacAgtggacaagagcaggt |
| | | | ggcagcaggggaaTgtcttctcatgctcTgtgatgcatgaggctctgcacaaccacta |
| | | | cacTcagaagagcctctccctgtctccTggtaaaagaaagaggAGAgagggcagagga |
| | | | agtcttctaacatgTggtgaTgtggaggagaatccTggccctATGGACATGAGGGTCC |
| | | | CTGCTCAGCTCCTGGGGCTCCTGCTGCTCTGGCTCTCAGGTGCCAGATGTgaggttca |
| | | | gctggtggagtctggTggtggcctGgtgcagccagggggctcactcAGAttgtcctgt |
| | | | gcagcttctggcttcaacattaaagacacctatatacactgggtgAGAcaggccccTg |
| | | | gAaagggcctggaatgggttgcaaggatttatcctacTaatggttatactagatatgc |
| | | | AgatagTgtcaagggcAGAttcactataagTgcagacacatccaaaaacacagcctac |
| | | | ctgcagatgaacagcctgAGAgctgaggacactgcAgtctattattgttctagatggg |
| | | | gaggggaTggcttctatgctatggacTACtggggtcaaggaaccctggtcacAgtctc |
| | | | ctcTggtggtggtggatcTggaggaggaggaAGTggaggtggaggtTCTgatatccag |
| | | | atgacccagtccccAagctccctgtcTgcctctgtgggGgatagggtcaccatcacct |
| | | | gcAGAgccagtcaggatgtgaatactgctgtagcctggtatcaacagaaaccaggaaa |
| | | | agctccCaaactactgatttactcTgcatccttcctcTACtctggagtcccttctAGA |
| | | | ttctctggatccagatctggCacTgaCttcactctgaccatcagTagtctgcagccTg |
| | | | aagacttTgcaacttattactgtcaAcaacattatactactcctcccacCttTggaca |
| | | | gggtaccaaggtggagatcaaaGGCTCTgatatTGTACTGacccagtccccTGACtcc |
| | | | ctgGCTGTGtctCTGggGGAAaggGCAaccatcAACtgcAGGAGTagtcagACCCTTC |
| | | | TGTACTCTAATAACCAGAAAAACTACCTGgcctggtatcaaAAAaaaccaggaCAGCC |
| | | | TccTaaactactgattAGTTGGgcaTTCACTAGGAAGtctggagtccctGACAGGttc |
| | | | tctggatcTGGGtcTggAacAgatttcacActgaccatcagcagtctgcagGCTgaag |
| | | | aTGTTgcaGTCtaCtactgtcagcaaTACTCAAACTACcctTGGacTttTggacaggg |
| | | | GaccaaAgtggagatcaaaAGGactgtCgctgcaccatctgtcttcatcttcccAcca |
| | | | tctgatgagcagttgaaatctggaactgcctctgttAAGtgcctgctgaataacttct |
| | | | atcccagagaggccaaagtacagtggaaggtggataaTgccctccaaAGTggtaactc |
| | | | ccaggagagtgtcacagagcaggacagcaaggacagcacctacagcctcagcagcacc |
| | | | ctgacCctgagcaaagcagactaTgagaaacacaaagtctaTgcctgTgaagtcaccc |
| | | | atcagggcctgagcACCccAgtcacaaagagcttcaacaggggagagtgttagtagta |
| | | | actcgaggacggggtgaactacgcctgaggatccgatctttttccctctgccaaaaat |
| | | | tatggggacatcatgaagccccttgagcatctgacttctggctaataaaggaaattta |
| | | | ttttcattgcaatagtgtgttggaattttttgtgtctctcactcggcctaggtagata |
| | | | agtagcatggcgggttaatcattaactacaaggaacccctagtgatggagttggccac |
| | | | tccctctctgcgcgctcgctcgctcactgaggccgggcgaccaaaggtcgcccgacgc |
| | | | ccgggctttgcccgggcggcctcagtgagcgagcgagcgcgcag |
| HER-75 | 3989 | 5190 | ctgcgcgctcgctcgctcactgaggccgcccgggcaaagcccgggcgtcgggcgacct |
| | | | ttggtcgcccggcctcagtgagcgagcgagcgcgcagagagggagtggccaactccat |
| | | | cactaggggttccttgtagttaatgattaacccgccatgctacttatctaccagggta |
| | | | atggggatcctctagaactatagctagtcgacattgattattgactagttattaatag |
| | | | taatcaattacggggtcattagttcatagcccatatatggagttccgcgttacataac |
| | | | ttacggtaaatggcccgcctggctgaccgcccaacgacccccgcccattgacgtcaat |
| | | | aatgacgtatgttcccatagtaacgccaatagggactttccattgacgtcaatgggtg |
| | | | gagtatttacggtaaactgcccacttggcagtacatcaagtgtatcatatgccaagta |
| | | | cgccccctattgacgtcaatgacggtaaatggcccgcctggcattatgcccagtacat |
| | | | gaccttatgggactttcctacttggcagtacatctacgtattagtcatcgctattacc |
| | | | atgtcgaggccacgttctgcttcactctccccatctcccccccctccccacccccaat |
| | | | tttgtatttatttattttttaattattttgtgcagcgatgggggcggggggggggggc |
| | | | gcgcgccaggcggggcggggcggggcgaggggcggggcggggcgaggcggagaggtgc |
| | | | ggcggcagccaatcagagcggcgcgctccgaaagtttccttttatggcgaggcggcgg |
| | | | cggcggcggccctataaaaagcgaagcgcgcggcgggcgggagcaagcttcgtttagt |
| | | | gaaccgtcagatcgcctggagacgccatccacgctgttttgacctccatagaagacac |
| | | | cgggaccgatccagcctccgcggattcgaatcccggccgggaacggtgcattggaacg |
| | | | cggattccccgtgccaagagtgacgtaagtaccgcctatagagtctataggcccacaa |
| | | | aaaatgctttcttcttttaatatacttttttgtttatcttatttctaatactttccct |
| | | | aatctctttctttcagggcaataatgatacaatgtatcatgcctctttgcaccattct |
| | | | aaagaataacagtgataatttctgggttaaggcaatagcaatatttctgcatataaat |
| | | | atttctgcatataaattgtaactgatgtaagaggtttcatattgctaatagcagctac |
| | | | aatccagctaccattctgcttttattttatggttgggataaggctggattattctgag |
| | | | tccaagctaggcccttttgctaatcatgttcatacctcttatcttcctcccacagctc |
| | | | ctgggcaacgtgctggtctgtgtgctggcccatcactttggcaaagaattgggattcg |
| | | | aaccggtgccgccaccATGGACTGGACCTGGAGGTTCCTCTTTGTGGTGGCAGCAGCT |
| | | | ACAGGTGTCCAGTCTgaggttcagctggtggagtctggAggtggcctggtgcagccag |
| | | | ggggctcactcAGAttgtcctgtgcagcttctggcttcaacattaaagacacctatat |
| | | | acactgggtgagacaggccccAggtaagggcctggaatgggttgcaaggatttatcct |
| | | | acCaatggttatactagatatgcTgatTCTgtcaagggcAGAttcactataTCTgcag |
| | | | acacatccaaaaacacagcctacctgcagatgaacagcctgAGAgctgaggacactgc |
| | | | TgtctattattgttctagatggggaggggaTggcttctatgctatggacTACtggggt |
| | | | caaggaaccctggtcacAgtctcctcTgcCtcTaccaagggcccatcTgtcttccccc |
| | | | tggcaccctcctccaagagcacctctgggggcacagcTgccctgggctgcctggtcaa |
| | | | ggactacttcccTgaacctgtgacAgtctcCtggaactcaggAgccctgaccagTggA |
| | | | gtgcacaccttcccTgctgtcctacagtcctcaggactctactccctcagcTCTgtgg |
| | | | tgacAgtgccctccagcagcttgggcacccagacctacatctgcaaTgtgaatcacaa |
| | | | gcccagcaacaccaaggtggacaagaGagttgagcccaaatcttgtgacaaaactcac |
| | | | acatgcccaccTtgcccagcacctgaactGGtggggggaccAtcagtcttcctcCtcc |
| | | | ccccaaaacccaaggacaccctcatgatctccAGAacccctgaggtcacatgTgtggt |
| | | | ggtggaTgtgagccaTgaagaccctgaggtcaagttcaactggtaTgtggaTggAgtg |
| | | | gaggtgcataatgccaagacaaagccCcCTgaggagcagtacaacagcacTCTcAGAg |
| | | | tggtcTCTgtcctcacAgtcctgcaccaggactggctgaatggcaaggagtacaagtg |
| | | | caaggtctccaacaaagccctcccagcccccatTgagaaaaccatctccaaagccaaa |
| | | | gggcagcccAGAgaaccacaggtgtacaccctgcccccatccAGAgaTgagCtgacca |
| | | | agaaccaggtcagcctgacctgcctggtcaaaggcttctatcccTCTgacatTgcTgt |
| | | | ggagtgggagagcaatgggcagccTgagaacaactacaagaccacAcctcTTgtgctg |
| | | | gactcTgaTggctccttcttcctctacagcaagctcacAgtggacaagagcaggtggc |
| | | | agcaggggaaTgtcttctcatgcTCTgtgatgcatgaggctctgcacaaccactacac |
| | | | CcagaagagcctctccctgtctccAggtaaaagaaagaggAGAgagggcagaggaagt |
| | | | cttctaacatgTggtgaTgtggaggagaatccTggccctATGGACATGAGGGTCCCTG |
| | | | CTCAGCTCCTGGGGCTCCTGCTGCTCTGGCTCTCAGGTGCCAGATGTgatatccagat |
| | | | gacccagtccccTagctccctgtcTgcctctgtgggAgatagggtcaccatcacctgc |
| | | | AGAgccagtcaggatgtgaatactgctgtagcctggtatcaacagaaaccaggaaaag |
| | | | ctccTaaactactgatttactcTgcatccttcctcTACtctggagtcccttctAGGtt |
| | | | ctctggatccagatctgggacTgatttcactctgaccatcagcagtctgcagccAgaa |
| | | | gacttTgcaacttattactgtcagcaacattatactactcctcccacTttTggacagg |
| | | | gtaccaaggtggagatcaaaAGAactgtggctgcaccatctgtcttcatcttcccAcc |
| | | | atctgatgagcagttgaaatctggaactgcctctgttgtgtgcctgctgaataacttc |
| | | | tatcccagagaggccaaagtacagtggaaggtggataaTgccctccaatcAggtaact |
| | | | cccaggagagtgtcacagagcaggacagcaaggacagcacctacagcctcagcagcac |
| | | | cctgacTctgagcaaagcagactaTgagaaacacaaagtctaTgcctgTgaagtcacc |
| | | | catcagggcctgagctcTccTgtcacaaagagcttcaacaggggagagtgttagtagt |
| | | | aactcgaggacggggtgaactacgcctgaggatccgatctttttccctctgccaaaaa |
| | | | ttatggggacatcatgaagccccttgagcatctgacttctggctaataaaggaaattt |
| | | | attttcattgcaatagtgtgttggaattttttgtgtctctcactcggcctaggtagat |
| | | | aagtagcatggcgggttaatcattaactacaaggaacccctagtgatggagttggcca |
| | | | ctccctctctgcgcgctcgctcgctcactgaggccgggcgaccaaaggtcgcccgacg |
| | | | cccgggctttgcccgggcggcctcagtgagcgagcgagcgcgcag |
| HER-77 | 3978 | 5343 | ctgcgcgctcgctcgctcactgaggccgcccgggcaaagcccgggcgtcgggcgacct |
| | | | ttggtcgcccggcctcagtgagcgagcgagcgcgcagagagggagtggccaactccat |
| | | | cactaggggttccttgtagttaatgattaacccgccatgctacttatctaccagggta |
| | | | atggggatcctctagaactatagctagtcgacattgattattgactagttattaatag |
| | | | taatcaattacggggtcattagttcatagcccatatatggagttccgcgttacataac |
| | | | ttacggtaaatggcccgcctggctgaccgcccaacgacccccgcccattgacgtcaat |
| | | | aatgacgtatgttcccatagtaacgccaatagggactttccattgacgtcaatgggtg |
| | | | gagtatttacggtaaactgcccacttggcagtacatcaagtgtatcatatgccaagta |
| | | | cgccccctattgacgtcaatgacggtaaatggcccgcctggcattatgcccagtacat |
| | | | gaccttatgggactttcctacttggcagtacatctacgtattagtcatcgctattacc |
| | | | atgtcgaggccacgttctgcttcactctccccatctcccccccctccccacccccaat |
| | | | tttgtatttatttattttttaattattttgtgcagcgatgggggcggggggggggggc |
| | | | gcgcgccaggcggggcggggcggggcgaggggcggggcggggcgaggcggagaggtgc |
| | | | ggcggcagccaatcagagcggcgcgctccgaaagtttccttttatggcgaggcggcgg |
| | | | cggcggcggccctataaaaagcgaagcgcgcggcgggcgggagcaagcttcgtttagt |
| | | | gaaccgtcagatcgcctggagacgccatccacgctgttttgacctccatagaagacac |
| | | | cgggaccgatccagcctccgcggattcgaatcccggccgggaacggtgcattggaacg |
| | | | cggattccccgtgccaagagtgacgtaagtaccgcctatagagtctataggcccacaa |
| | | | aaaatgctttcttcttttaatatacttttttgtttatcttatttctaatactttccct |
| | | | aatctctttctttcagggcaataatgatacaatgtatcatgcctctttgcaccattct |
| | | | aaagaataacagtgataatttctgggttaaggcaatagcaatatttctgcatataaat |
| | | | atttctgcatataaattgtaactgatgtaagaggtttcatattgctaatagcagctac |
| | | | aatccagctaccattctgcttttattttatggttgggataaggctggattattctgag |
| | | | tccaagctaggcccttttgctaatcatgttcatacctcttatcttcctcccacagctc |
| | | | ctgggcaacgtgctggtctgtgtgctggcccatcactttggcaaagaattgggattcg |
| | | | aaccggtgccgccaccATGGACTGGACCTGGAGGTTCCTCTTTGTGGTGGCAGCAGCT |
| | | | ACAGGTGTCCAGTCCGAAGTGCAGCTGGTGGAAAGCGGCGGAGGACTGGTGCAGCCTG |
| | | | GCGGATCTCTGAGACTGAGCTGTGCCGCCAGCGGCTTCAACATCAAGGACACCTACAT |
| | | | CCACTGGGTGCGCCAGGCCCCTGGCAAGGGACTGGAATGGGTGGCCAGAATCTACCCC |
| | | | ACCAACGGCTACACCAGATACGCCGACAGCGTGAAGGGCCGGTTCACCATCAGCGCCG |
| | | | ACACCAGCAAGAACACCGCCTACCTGCAGATGAACAGCCTGCGGGCCGAGGACACCGC |
| | | | CGTGTACTACTGTAGTAGATGGGGAGGCGACGGCTTCTACGCCATGGACTATTGGGGC |
| | | | CAGGGCACCCTCGTGACAGTGTCTAGTGCGTCGACCAAGGGGCCCTCGGTCTTCCCCC |
| | | | TGGCACCCTCCTCCAAGAGCACCTCTGGGGGCACAGCGGCCCTGGGCTGCCTGGTCAA |
| | | | GGACTACTTCCCCGAACCGGTGACGGTGTCGTGGAACTCAGGCGCCCTGACCAGCGGC |
| | | | GTGCACACCTTCCCGGCTGTCCTACAGTCCTCAGGACTCTACTCCCTCAGCAGCGTGG |
| | | | TGACCGTGCCCTCCAGCAGCTTGGGCACCCAGACCTACATCTGCAACGTGAATCACAA |
| | | | GCCCAGCAACACCAAGGTGGACAAGAAAGTTGAGCCCAAATCTTGTGACAAAACTCAC |
| | | | ACATGCCCACCGTGCCCAGCACCTGAACTCCTGGGGGGACCGTCAGTCTTCCTCTTCC |
| | | | CCCCAAAACCCAAGGACACCCTCATGATCTCCCGGACCCCTGAGGTCACATGCGTGGT |
| | | | GGTGGACGTGAGCCACGAAGACCCTGAGGTCAAGTTCAACTGGTACGTGGACGGCGTG |
| | | | GAGGTGCATAATGCCAAGACAAAGCCGCGGGAGGAGCAGTACAACAGCACGTACCGTG |
| | | | TGGTCAGCGTCCTCACCGTCCTGCACCAGGACTGGCTGAATGGCAAGGAGTACAAGTG |
| | | | CAAGGTCTCCAACAAAGCCCTCCCAGCCCCCATCGAGAAAACCATCTCCAAAGCCAAA |
| | | | GGGCAGCCCCGAGAACCACAGGTGTACACCCTGCCCCCATCCCGGGATGAGCTGACCA |
| | | | AGAACCAGGTCAGCCTGACCTGCCTGGTCAAAGGCTTCTATCCCAGCGACATCGCCGT |
| | | | GGAGTGGGAGAGCAATGGGCAGCCGGAGAACAACTACAAGACCACGCCTCCCGTGCTG |
| | | | GACTCCGACGGCTCCTTCTTCCTCTACAGCAAGCTCACCGTGGACAAGAGCAGGTGGC |
| | | | AGCAGGGGAACGTCTTCTCATGCTCCGTGATGCATGAGGCTCTGCACAACCACTACAC |
| | | | GCAGAAGAGCCTCTCCCTGTCTCCCGGCAAGagaaagaggcgagagggcagaggaagt |
| | | | cttctaacatgcggtgacgtggaggagaatcccggccctATGGACATGAGGGTCCCTG |
| | | | CTCAGCTCCTGGGGCTCCTGCTGCTCTGGCTCTCAGGTGCCAGATGTGATATCCAGAT |
| | | | GACCCAGAGCCCCAGCAGCCTGTCTGCCAGCGTGGGCGACAGAGTGACCATCACCTGT |
| | | | AGAGCCAGCCAGGACGTGAACACCGCCGTGGCCTGGTATCAGCAGAAGCCTGGCAAGG |
| | | | CCCCCAAGCTGCTGATCTACAGCGCCAGCTTCCTGTACAGCGGCGTGCCCAGCAGATT |
| | | | CAGCGGCAGCAGATCCGGCACCGACTTCACCCTGACCATCAGCTCCCTGCAGCCCGAG |
| | | | GACTTCGCCACCTACTACTGCCAGCAGCACTACACCACCCCCCCCACATTTGGCCAGG |
| | | | GCACCAAGGTGGAAATCAAGCGTACGGTGGCTGCACCATCTGTCTTCATCTTCCCGCC |
| | | | ATCTGATGAGCAGTTGAAATCTGGAACTGCCTCTGTTGTGTGCCTGCTGAATAACTTC |
| | | | TACCCCAGAGAAGCCAAAGTGCAGTGGAAGGTGGACAACGCCCTGCAGAGCGGAAACA |
| | | | GCCAGGAAAGCGTGACAGAGCAGGATTCCAAGGATTCCACATACAGCCTGAGCAGCAC |
| | | | ACTGACACTGTCCAAGGCCGACTACGAGAAGCACAAGGTGTACGCCTGCGAAGTGACA |
| | | | CACCAGGGACTGTCCTCCCCTGTGACAAAGAGCTTCAACAGAGGAGAATGCtagtagt |
| | | | aactcgaggacggggtgaactacgcctgaggatccgatctttttccctctgccaaaaa |
| | | | ttatggggacatcatgaagccccttgagcatctgacttctggctaataaaggaaattt |
| | | | attttcattgcaatagtgtgttggaattttttgtgtctctcactcggcctaggtagat |
| | | | aagtagcatggcgggttaatcattaactacaaggaacccctagtgatggagttggcca |
| | | | ctccctctctgcgcgctcgctcgctcactgaggccgggcgaccaaaggtcgcccgacg |
| | | | cccgggctttgcccgggcggcctcagtgagcgagcgagcgcgcag |
| HER-78 | 4739 | 5375 | ctgcgcgctcgctcgctcactgaggccgcccgggcaaagcccgggcgtcgggcgacct |
| | | | ttggtcgcccggcctcagtgagcgagcgagcgcgcagagagggagtggccaactccat |
| | | | cactaggggttccttgtagttaatgattaacccgccatgctacttatctaccagggta |
| | | | atggggatcctctagaactatagctagtcgacattgattattgactagttattaatag |
| | | | taatcaattacggggtcattagttcatagcccatatatggagttccgcgttacataac |
| | | | ttacggtaaatggcccgcctggctgaccgcccaacgacccccgcccattgacgtcaat |
| | | | aatgacgtatgttcccatagtaacgccaatagggactttccattgacgtcaatgggtg |
| | | | gagtatttacggtaaactgcccacttggcagtacatcaagtgtatcatatgccaagta |
| | | | cgccccctattgacgtcaatgacggtaaatggcccgcctggcattatgcccagtacat |
| | | | gaccttatgggactttcctacttggcagtacatctacgtattagtcatcgctattacc |
| | | | atgtcgaggccacgttctgcttcactctccccatctcccccccctccccacccccaat |
| | | | tttgtatttatttattttttaattattttgtgcagcgatgggggcggggggggggggc |
| | | | gcgcgccaggcggggcggggcggggcgaggggcggggcggggcgaggcggagaggtgc |
| | | | ggcggcagccaatcagagcggcgcgctccgaaagtttccttttatggcgaggcggcgg |
| | | | cggcggcggccctataaaaagcgaagcgcgcggcgggcgggagcaagcttcgtttagt |
| | | | gaaccgtcagatcgcctggagacgccatccacgctgttttgacctccatagaagacac |
| | | | cgggaccgatccagcctccgcggattcgaatcccggccgggaacggtgcattggaacg |
| | | | cggattccccgtgccaagagtgacgtaagtaccgcctatagagtctataggcccacaa |
| | | | aaaatgctttcttcttttaatatacttttttgtttatcttatttctaatactttccct |
| | | | aatctctttctttcagggcaataatgatacaatgtatcatgcctctttgcaccattct |
| | | | aaagaataacagtgataatttctgggttaaggcaatagcaatatttctgcatataaat |
| | | | atttctgcatataaattgtaactgatgtaagaggtttcatattgctaatagcagctac |
| | | | aatccagctaccattctgcttttattttatggttgggataaggctggattattctgag |
| | | | tccaagctaggcccttttgctaatcatgttcatacctcttatcttcctcccacagctc |
| | | | ctgggcaacgtgctggtctgtgtgctggcccatcactttggcaaagaattgggattcg |
| | | | aaccggtgccgccaccATGGACTGGACCTGGAGGTTCCTCTTTGTGGTGGCAGCAGCT |
| | | | ACAGGTGTCCAGTCCCAAgttcagctggtgCAGtctggTGCAGAAGTTAAGAAGccag |
| | | | ggGCAtcaGTAAAGGTGTCCtgCAAGgcttctggcTACTCTTTCACTGGGTATTTCat |
| | | | aAATtgggtgAGAGAGgccccCGGCCAGggcctggaatggATGGGCCATattTCCTCC |
| | | | TCTTATGCAACTTCTACAtatAACCAGAAGTTTCAGggcAGAGTCactTTCACTGTGg |
| | | | acacatccAGCTCTacagcctacATGGAGCTGTCAagcctgAGATCTgaggacactgc |
| | | | agtctattattgtGTGagaAGTggaAACTAtGAAGAGTATgctatggacTACtggggt |
| | | | caaggaaccctggtcacAgtctcctcAgcCtcTaccaagggcccatcTgtcttccccc |
| | | | tggcaccctcctccaagagcacctctgggggcacagcTgccctgggctgcctggtcaa |
| | | | ggactacttcccTgaacctgtgacAgtctcCtggaactcaggAgccctgaccagTggA |
| | | | gtgcacaccttcccTgctgtcctacagtcctcaggactctactccctcagcTCTgtgg |
| | | | tgacAgtgccctccagcagcttgggcacccagacctacatctgcaaTgtgaatcacaa |
| | | | gcccagcaacaccaaggtggacaagaGagttgagcccaaatcttgtgacaaaactcac |
| | | | acatgcccaccTtgcccagcacctgaactGGtggggggaccAtcagtcttcctcCtcc |
| | | | ccccaaaacccaaggacaccctcatgatctccAGAacccctgaggtcacatgTgtggt |
| | | | ggtggaTgtgagccaTgaagaccctgaggtcaagttcaactggtaTgtggaTggAgtg |
| | | | gaggtgcataatgccaagacaaagccCcCTgaggagcagtacaacagcacTCTcAGAg |
| | | | tggtcTCTgtcctcacAgtcctgcaccaggactggctgaatggcaaggagtacaagtg |
| | | | caaggtctccaacaaagccctcccagcccccatTgagaaaaccatctccaaagccaaa |
| | | | gggcagcccAGAgaaccacaggtgtacaccctgcccccatccAGAgaTgagCtgacca |
| | | | agaaccaggtcagcctgacctgcctggtcaaaggcttctatcccTCTgacatTgcTgt |
| | | | ggagtgggagagcaatgggcagccTgagaacaactacaagaccacAcctcTTgtgctg |
| | | | gactcTgaTggctccttcttcctctacagcaagctcacAgtggacaagagcaggtggc |
| | | | agcaggggaaTgtcttctcatgcTCTgtgatgcatgaggctctgcacaaccactacac |
| | | | CcagaagagcctctccctgtctccAggtaaaagaaagaggAGAgagggcagaggaagt |
| | | | cttctaacatgTggtgaTgtggaggagaatccTggccctATGGACATGAGGGTCCCTG |
| | | | CTCAGCTCCTGGGGCTCCTGCTGCTCTGGCTCTCAGGTGCCAGATGTgaggttcagct |
| | | | ggtggagtctggTggtggcctGgtgcagccagggggctcactcAGAttgtcctgtgca |
| | | | gcttctggcttcaacattaaagacacctatatacactgggtgAGAcaggccccTggAa |
| | | | agggcctggaatgggttgcaaggatttatcctacTaatggttatactagatatgcAga |
| | | | tagTgtcaagggcAGAttcactataagTgcagacacatccaaaaacacagcctacctg |
| | | | cagatgaacagcctgAGAgctgaggacactgcAgtctattattgttctagatggggag |
| | | | gggaTggcttctatgctatggacTACtggggtcaaggaaccctggtcacAgtctcctc |
| | | | TggtggtggtggatcTggaggaggaggaAGTggaggtggaggtTCTgatatccagatg |
| | | | acccagtccccAagctccctgtcTgcctctgtgggGgatagggtcaccatcacctgcA |
| | | | GAgccagtcaggatgtgaatactgctgtagcctggtatcaacagaaaccaggaaaagc |
| | | | tccCaaactactgatttactcTgcatccttcctcTACtctggagtcccttctAGAttc |
| | | | tctggatccagatctggCacTgaCttcactctgaccatcagTagtctgcagccTgaag |
| | | | acttTgcaacttattactgtcaAcaacattatactactcctcccacCttTggacaggg |
| | | | taccaaggtggagatcaaaGGCTCTgatatTGTACTGacccagtccccTGACtccctg |
| | | | GCTGTGtctCTGggGGAAaggGCAaccatcAACtgcAGGAGTagtcagACCCTTCTGT |
| | | | ACTCTAATAACCAGAAAAACTACCTGgcctggtatcaaAAAaaaccaggaCAGCCTcc |
| | | | TaaactactgattAGTTGGgcaTTCACTAGGAAGtctggagtccctGACAGGttctct |
| | | | ggatcTGGGtcTggAacAgatttcacActgaccatcagcagtctgcagGCTgaagaTG |
| | | | TTgcaGTCtaCtactgtcagcaaTACTCAAACTACcctTGGacTttTggacagggGac |
| | | | caaAgtggagatcaaaAGGactgtCgctgcaccatctgtcttcatcttcccAccatct |
| | | | gatgagcagttgaaatctggaactgcctctgttAAGtgcctgctgaataacttctatc |
| | | | ccagagaggccaaagtacagtggaaggtggataaTgccctccaaAGTggtaactccca |
| | | | ggagagtgtcacagagcaggacagcaaggacagcacctacagcctcagcagcaccctg |
| | | | acCctgagcaaagcagactaTgagaaacacaaagtctaTgcctgTgaagtcacccatc |
| | | | agggcctgagcAGCccAgtcacaaagagcttcaacaggggagagtgttagtagtaact |
| | | | cgaggacggggtgaactacgcctgaggatccgatctttttccctctgccaaaaattat |
| | | | ggggacatcatgaagccccttgagcatctgacttctggctaataaaggaaatttattt |
| | | | tcattgcaatagtgtgttggaattttttgtgtctctcactcggcctaggtagataagt |
| | | | agcatggcgggttaatcattaactacaaggaacccctagtgatggagttggccactcc |
| | | | ctctctgcgcgctcgctcgctcactgaggccgggcgaccaaaggtcgcccgacgcccg |
| | | | ggctttgcccgggcggcctcagtgagcgagcgagcgcgcag |
| HER-82 | 4505 | 5374 | ctgcgcgctcgctcgctcactgaggccgcccgggcaaagcccgggcgtcgggcgacct |
| | | | ttggtcgcccggcctcagtgagcgagcgagcgcgcagagagggagtggccaactccat |
| | | | cactaggggttccttgtagttaatgattaacccgccatgctacttatctaccagggta |
| | | | atggggatcctctagaactatagctagtcgacattgattattgactagttattaatag |
| | | | taatcaattacggggtcattagttcatagcccatatatggagttccgcgttacataac |
| | | | ttacggtaaatggcccgcctggctgaccgcccaacgacccccgcccattgacgtcaat |
| | | | aatgacgtatgttcccatagtaacgccaatagggactttccattgacgtcaatgggtg |
| | | | gagtatttacggtaaactgcccacttggcagtacatcaagtgtatcatatgccaagta |
| | | | cgccccctattgacgtcaatgacggtaaatggcccgcctggcattatgcccagtacat |
| | | | gaccttatgggactttcctacttggcagtacatctacgtattagtcatcgctattacc |
| | | | atgtcgaggccacgttctgcttcactctccccatctcccccccctccccacccccaat |
| | | | tttgtatttatttattttttaattattttgtgcagcgatgggggcggggggggggggc |
| | | | gcgcgccaggcggggcggggcggggcgaggggcggggcggggcgaggcggagaggtgc |
| | | | ggcggcagccaatcagagcggcgcgctccgaaagtttccttttatggcgaggcggcgg |
| | | | cggcggcggccctataaaaagcgaagcgcgcggcgggcgggagcaagcttcgtttagt |
| | | | gaaccgtcagatcgcctggagacgccatccacgctgttttgacctccatagaagacac |
| | | | cgggaccgatccagcctccgcggattcgaatcccggccgggaacggtgcattggaacg |
| | | | cggattccccgtgccaagagtgacgtaagtaccgcctatagagtctataggcccacaa |
| | | | aaaatgctttcttcttttaatatacttttttgtttatcttatttctaatactttccct |
| | | | aatctctttctttcagggcaataatgatacaatgtatcatgcctctttgcaccattct |
| | | | aaagaataacagtgataatttctgggttaaggcaatagcaatatttctgcatataaat |
| | | | atttctgcatataaattgtaactgatgtaagaggtttcatattgctaatagcagctac |
| | | | aatccagctaccattctgcttttattttatggttgggataaggctggattattctgag |
| | | | tccaagctaggcccttttgctaatcatgttcatacctcttatcttcctcccacagctc |
| | | | ctgggcaacgtgctggtctgtgtgctggcccatcactttggcaaagaattgggattcg |
| | | | aaccggtgccgccaccATGGACTGGACCTGGAGGTTCCTCTTTGTGGTGGCAGCAGCT |
| | | | ACAGGTGTCCAGTCCgaggttcagctggtggagtctggcggtggcctggtgcagccag |
| | | | ggggctcactccgtttgtcctgtgcagcttctggcttcaacattaaagacacctatat |
| | | | acactgggtgcgtcaggccccgggtaagggcctggaatgggttgcaaggatttatcct |
| | | | acgaatggttatactagatatgccgatagcgtcaagggccgtttcactataagcgcag |
| | | | acacatccaaaaacacagcctacctgcagatgaacagcctgcgtgctgaggacactgc |
| | | | cgtctattattgttctagatggggaggggacggcttctatgctatggacTACtggggt |
| | | | caaggaaccctggtcaccgtctcctcggcgtcgaccaagggcccatcggtcttccccc |
| | | | tggcaccctcctccaagagcacctctgggggcacagcggccctgggctgcctggtcaa |
| | | | ggactacttccccgaacctgtgacggtctcgtggaactcaggcgccctgaccagcggc |
| | | | gtgcacaccttcccggctgtcctacagtcctcaggactctactccctcagcagcgtgg |
| | | | tgaccgtgccctccagcagcttgggcacccagacctacatctgcaacgtgaatcacaa |
| | | | gcccagcaacaccaaggtggacaagaGagttgagcccaaatcttgtgacaaaactcac |
| | | | acatgcccaccgtgcccagcacctgaactcGtggggggaccgtcagtcttcctcCtcc |
| | | | ccccaaaacccaaggacaccctcatgatctcccggacccctgaggtcacatgcgtggt |
| | | | ggtggacgtgagccacgaagaccctgaggtcaagttcaactggtacgtggacggcgtg |
| | | | gaggtgcataatgccaagacaaagccgcCggaggagcagtacaacagcacgCTccgtg |
| | | | tggtcagcgtcctcaccgtcctgcaccaggactggctgaatggcaaggagtacaagtg |
| | | | caaggtctccaacaaagccctcccagcccccatcgagaaaaccatctccaaagccaaa |
| | | | gggcagccccgagaaccacaggtgtacaccctgcccccatcccgggaTgagCtgacca |
| | | | agaaccaggtcagcctgacctgcctggtcaaaggcttctatcccagcgacatcgccgt |
| | | | ggagtgggagagcaatgggcagccggagaacaactacaagaccacgcctcTcgtgctg |
| | | | gactccgacggctccttcttcctctacagcaagctcaccgtggacaagagcaggtggc |
| | | | agcaggggaacgtcttctcatgctccgtgatgcatgaggctctgcacaaccactacac |
| | | | gcagaagagcctctccctgtctccgggtaaaagaaagaggcgagagggcagaggaagt |
| | | | cttctaacatgcggtgacgtggaggagaatcccggccctATGGACATGAGGGTCCCTG |
| | | | CTCAGCTCCTGGGGCTCCTGCTGCTCTGGCTCTCAGGTGCCAGATGTGGCTCTGATCT |
| | | | GGGAAAAAAGCTTCTgGAGGCtGCcAGAGCtGGACAGGAtGAtGAAGTGagaATACTG |
| | | | ATGGCTAAtGGTGCTGATGTGAATGCCCAtGATTTTTATGGAATCACTCCCTTACACT |
| | | | TAGCTGCCAATTTtGGGCACCTgGAGATTGTGGAAGTGCTCCTGAAGCATGGaGCAGA |
| | | | TGTAAAtGCATTtGATTAtGATAACACTCCACTGCACCTGGCtGCAGATGCtGGACAT |
| | | | CTGGAGATtGTGGAAGTACTGTTAAAATAtGGAGCAGAtGTGAATGCATCtGACagaG |
| | | | ATGGACATACACCACTGCACCTGGCAGCTagaGAGGGACATCTTGAAATTGTTGAAGT |
| | | | CCTGCTTAAGAAtGGTGCtGATGTCAATGCCCAGGACAAGTTTGGGAAGACAGCTTTT |
| | | | GACATTTCAATtGATAAtGGAAAtGAGGATCTGGCtGAAATACTTCAGAAATTGggtg |
| | | | gtggtggatctggaggaggaggaAGTggaggtggaggtTCTgatatccagatgaccca |
| | | | gtccccgagctccctgtccgcctctgtgggcgatagggtcaccatcacctgccgtgcc |
| | | | agtcaggatgtgaatactgctgtagcctggtatcaacagaaaccaggaaaagctccga |
| | | | aactactgatttactcggcatccttcctcTACtctggagtcccttctcgcttctctgg |
| | | | atccagatctgggacggatttcactctgaccatcagcagtctgcagccggaagacttc |
| | | | gcaacttattactgtcagcaacattatactactcctcccacgttcggacagggtacca |
| | | | aggtggagatcaaacgaactgtggctgcaccatctgtcttcatcttcccgccatctga |
| | | | tgagcagttgaaatctggaactgcctctgttgtgtgcctgctgaataacttctatccc |
| | | | agagaggccaaagtacagtggaaggtggataacgccctccaatcgggtaactcccagg |
| | | | agagtgtcacagagcaggacagcaaggacagcacctacagcctcagcagcaccctgac |
| | | | gctgagcaaagcagactacgagaaacacaaagtctacgcctgcgaagtcacccatcag |
| | | | ggcctgagctcgcccgtcacaaagagcttcaacaggggagagtgttagtagtaactcg |
| | | | aggacggggtgaactacgcctgaggatccgatctttttccctctgccaaaaattatgg |
| | | | ggacatcatgaagccccttgagcatctgacttctggctaataaaggaaatttattttc |
| | | | attgcaatagtgtgttggaattttttgtgtctctcactcggcctaggtagataagtag |
| | | | catggcgggttaatcattaactacaaggaacccctagtgatggagttggccactccct |
| | | | ctctgcgcgctcgctcgctcactgaggccgggcgaccaaaggtcgcccgacgcccggg |
| | | | ctttgcccgggcggcctcagtgagcgagcgagcgcgcag |
| HER-88 | 3989 | 6500 | ctgcgcgctcgctcgctcactgaggccgcccgggcaaagcccgggcgtcgggcgacct |
| | | | ttggtcgcccggcctcagtgagcgagcgagcgcgcagagagggagtggccaactccat |
| | | | cactaggggttccttgtagttaatgattaacccgccatgctacttatctaccagggta |
| | | | atggggatcctctagaactatagctagtcgacattgattattgactagttattaatag |
| | | | taatcaattacggggtcattagttcatagcccatatatggagttccgcgttacataac |
| | | | ttacggtaaatggcccgcctggctgaccgcccaacgacccccgcccattgacgtcaat |
| | | | aatgacgtatgttcccatagtaacgccaatagggactttccattgacgtcaatgggtg |
| | | | gagtatttacggtaaactgcccacttggcagtacatcaagtgtatcatatgccaagta |
| | | | cgccccctattgacgtcaatgacggtaaatggcccgcctggcattatgcccagtacat |
| | | | gaccttatgggactttcctacttggcagtacatctacgtattagtcatcgctattacc |
| | | | atgtcgaggccacgttctgcttcactctccccatctcccccccctccccacccccaat |
| | | | tttgtatttatttattttttaattattttgtgcagcgatgggggcggggggggggggc |
| | | | gcgcgccaggcggggcggggcggggcgaggggcggggcggggcgaggcggagaggtgc |
| | | | ggcggcagccaatcagagcggcgcgctccgaaagtttccttttatggcgaggcggcgg |
| | | | cggcggcggccctataaaaagcgaagcgcgcggcgggcgggagcaagcttcgtttagt |
| | | | gaaccgtcagatcgcctggagacgccatccacgctgttttgacctccatagaagacac |
| | | | cgggaccgatccagcctccgcggattcgaatcccggccgggaacggtgcattggaacg |
| | | | cggattccccgtgccaagagtgacgtaagtaccgcctatagagtctataggcccacaa |
| | | | aaaatgctttcttcttttaatatacttttttgtttatcttatttctaatactttccct |
| | | | aatctctttctttcagggcaataatgatacaatgtatcatgcctctttgcaccattct |
| | | | aaagaataacagtgataatttctgggttaaggcaatagcaatatttctgcatataaat |
| | | | atttctgcatataaattgtaactgatgtaagaggtttcatattgctaatagcagctac |
| | | | aatccagctaccattctgcttttattttatggttgggataaggctggattattctgag |
| | | | tccaagctaggcccttttgctaatcatgttcatacctcttatcttcctcccacagctc |
| | | | ctgggcaacgtgctggtctgtgtgctggcccatcactttggcaaagaattgggattcg |
| | | | aaccggtgccgccaccATGGACTGGACCTGGAGGTTCCTCTTTGTGGTGGCAGCAGCT |
| | | | ACAGGTGTCCAGTCTgaggttcagctggtggagtctggAggtggcctggtgcagccag |
| | | | ggggctcactcAGAttgtcctgtgcagcttctggcttcaacattaaagacacctatat |
| | | | acactgggtgagacaggccccAggtaagggcctggaatgggttgcaaggatttatcct |
| | | | acCaatggttatactagatatgcTgatTCTgtcaagggcAGAttcactataTCTgcag |
| | | | acacatccaaaaacacagcctacctgcagatgaacagcctgAGAgctgaggacactgc |
| | | | TgtctattattgttctagatggggagggTGGggcttctatgctTTTGCCCTGtggggt |
| | | | caaggaaccctggtcacAgtctcctcTgcCtcTaccaagggcccatcTgtcttccccc |
| | | | tggcaccctcctccaagagcacctctgggggcacagcTgccctgggctgcctggtcaa |
| | | | ggactacttcccTgaacctgtgacAgtctcCtggaactcaggAgccctgaccagTggA |
| | | | gtgcacaccttcccTgctgtcctacagtcctcaggactctactccctcagcTCTgtgg |
| | | | tgacAgtgccctccagcagcttgggcacccagacctacatctgcaaTgtgaatcacaa |
| | | | gcccagcaacaccaaggtggacaagaGagttgagcccaaatcttgtgacaaaactcac |
| | | | acatgcccaccTtgcccagcacctgaactGGtggggggaccAtcagtcttcctcCtcc |
| | | | ccccaaaacccaaggacaccctcatgatctccAGAacccctgaggtcacatgTgtggt |
| | | | ggtggaTgtgagccaTgaagaccctgaggtcaagttcaactggtaTgtggaTggAgtg |
| | | | gaggtgcataatgccaagacaaagccCcCTgaggagcagtacaacagcacTCTcAGAg |
| | | | tggtcTCTgtcctcacAgtcctgcaccaggactggctgaatggcaaggagtacaagtg |
| | | | caaggtctccaacaaagccctcccagcccccatTgagaaaaccatctccaaagccaaa |
| | | | gggcagcccAGAgaaccacaggtgtacaccctgcccccatccAGAgaTgagCtgacca |
| | | | agaaccaggtcagcctgacctgcctggtcaaaggcttctatcccTCTgacatTgcTgt |
| | | | ggagtgggagagcaatgggcagccTgagaacaactacaagaccacAcctcTTgtgctg |
| | | | gactcTgaTggctccttcttcctctacagcaagctcacAgtggacaagagcaggtggc |
| | | | agcaggggaaTgtcttctcatgcTCTgtgatgcatgaggctctgcacaaccactacac |
| | | | CcagaagagcctctccctgtctccAggtaaaagaaagaggAGAgagggcagaggaagt |
| | | | cttctaacatgTggtgaTgtggaggagaatccTggccctATGGACATGAGGGTCCCTG |
| | | | CTCAGCTCCTGGGGCTCCTGCTGCTCTGGCTCTCAGGTGCCAGATGTgatatccagat |
| | | | gacccagtccccTagctccctgtcTgcctctgtgggAgatagggtcaccatcacctgc |
| | | | AGAgccagtcaggatgtgaatactgctgtagcctggtatcaacagaaaccaggaaaag |
| | | | ctccTaaactactgatttactcTgcatccttcctcTACtctggagtcccttctAGGtt |
| | | | ctctggatccagatctgggacTgatttcactctgaccatcagcagtctgcagccAgaa |
| | | | gacttTgcaacttattactgtcagcaacattatactactcctcccacTttTggacagg |
| | | | gtaccaaggtggagatcaaaAGAactgtggctgcaccatctgtcttcatcttcccAcc |
| | | | atctgatgagcagttgaaatctggaactgcctctgttgtgtgcctgctgaataacttc |
| | | | tatcccagagaggccaaagtacagtggaaggtggataaTgccctccaatcAggtaact |
| | | | cccaggagagtgtcacagagcaggacagcaaggacagcacctacagcctcagcagcac |
| | | | cctgacTctgagcaaagcagactaTgagaaacacaaagtctaTgcctgTgaagtcacc |
| | | | catcagggcctgagctcTccTgtcacaaagagcttcaacaggggagagtgttagtagt |
| | | | aactcgaggacggggtgaactacgcctgaggatccgatctttttccctctgccaaaaa |
| | | | ttatggggacatcatgaagccccttgagcatctgacttctggctaataaaggaaattt |
| | | | attttcattgcaatagtgtgttggaattttttgtgtctctcactcggcctaggtagat |
| | | | aagtagcatggcgggttaatcattaactacaaggaacccctagtgatggagttggcca |
| | | | ctccctctctgcgcgctcgctcgctcactgaggccgggcgaccaaaggtcgcccgacg |
| | | | cccgggctttgcccgggcggcctcagtgagcgagcgagcgcgcag |
| HER-89 | 3989 | 6501 | ctgcgcgctcgctcgctcactgaggccgcccgggcaaagcccgggcgtcgggcgacct |
| | | | ttggtcgcccggcctcagtgagcgagcgagcgcgcagagagggagtggccaactccat |
| | | | cactaggggttccttgtagttaatgattaacccgccatgctacttatctaccagggta |
| | | | atggggatcctctagaactatagctagtcgacattgattattgactagttattaatag |
| | | | taatcaattacggggtcattagttcatagcccatatatggagttccgcgttacataac |
| | | | ttacggtaaatggcccgcctggctgaccgcccaacgacccccgcccattgacgtcaat |
| | | | aatgacgtatgttcccatagtaacgccaatagggactttccattgacgtcaatgggtg |
| | | | gagtatttacggtaaactgcccacttggcagtacatcaagtgtatcatatgccaagta |
| | | | cgccccctattgacgtcaatgacggtaaatggcccgcctggcattatgcccagtacat |
| | | | gaccttatgggactttcctacttggcagtacatctacgtattagtcatcgctattacc |
| | | | atgtcgaggccacgttctgcttcactctccccatctcccccccctccccacccccaat |
| | | | tttgtatttatttattttttaattattttgtgcagcgatgggggcggggggggggggc |
| | | | gcgcgccaggcgggcgggggcggggcgaggggcgggggcgggcgaggcggagaggtgc |
| | | | ggcggcagccaatcagagcggcgcgctccgaaagtttccttttatggcgaggcggcgg |
| | | | cggcggcggccctataaaaagcgaagcgcgcggcgggcgggagcaagcttcgtttagt |
| | | | gaaccgtcagatcgcctggagacgccatccacgctgttttgacctccatagaagacac |
| | | | cgggaccgatccagcctccgcggattcgaatcccggccgggaacggtgcattggaacg |
| | | | cggattccccgtgccaagagtgacgtaagtaccgcctatagagtctataggcccacaa |
| | | | aaaatgctttcttcttttaatatacttttttgtttatcttatttctaatactttccct |
| | | | aatctctttctttcagggcaataatgatacaatgtatcatgcctctttgcaccattct |
| | | | aaagaataacagtgataatttctgggttaaggcaatagcaatatttctgcatataaat |
| | | | atttctgcatataaattgtaactgatgtaagaggtttcatattgctaatagcagctac |
| | | | aatccagctaccattctgcttttattttatggttgggataaggctggattattctgag |
| | | | tccaagctaggcccttttgctaatcatgttcatacctcttatcttcctcccacagctc |
| | | | ctgggcaacgtgctggtctgtgtgctggcccatcactttggcaaagaattgggattcg |
| | | | aaccggtgccgccaccATGGACTGGACCTGGAGGTTCCTCTTTGTGGTGGCAGCAGCT |
| | | | ACAGGTGTCCAGTCTgaggttcagctggtggagtctggAggtggcctggtgcagccag |
| | | | ggggctcactcAGAttgtcctgtgcagcttctggcttcaacattaaagacacctatat |
| | | | acactgggtgagacaggccccAggtaagggcctggaatgggttgcaaggatttatcct |
| | | | acCaatggttatactagatatgcTgatTCTgtcaagggcAGAttcactataTCTgcag |
| | | | acacatccaaaaacacagcctacctgcagatgaacagcctgAGAgctgaggacactgc |
| | | | TgtctattattgttctagatggggagggTGGggcttctatgctTTTGCCTACtggggt |
| | | | caaggaaccctggtcacAgtctcctcTgcCtcTaccaagggcccatcTgtcttccccc |
| | | | tggcaccctcctccaagagcacctctgggggcacagcTgccctgggctgcctggtcaa |
| | | | ggactacttcccTgaacctgtgacAgtctcCtggaactcaggAgccctgaccagTggA |
| | | | gtgcacaccttcccTgctgtcctacagtcctcaggactctactccctcagcTCTgtgg |
| | | | tgacAgtgccctccagcagcttgggcacccagacctacatctgcaaTgtgaatcacaa |
| | | | gcccagcaacaccaaggtggacaagaGagttgagcccaaatcttgtgacaaaactcac |
| | | | acatgcccaccTtgcccagcacctgaactGGtggggggaccAtcagtcttcctcCtcc |
| | | | ccccaaaacccaaggacaccctcatgatctccAGAacccctgaggtcacatgTgtggt |
| | | | ggtggaTgtgagccaTgaagaccctgaggtcaagttcaactggtaTgtggaTggAgtg |
| | | | gaggtgcataatgccaagacaaagccCcCTgaggagcagtacaacagcacTCTcAGAg |
| | | | tggtcTCTgtcctcacAgtcctgcaccaggactggctgaatggcaaggagtacaagtg |
| | | | caaggtctccaacaaagccctcccagcccccatTgagaaaaccatctccaaagccaaa |
| | | | gggcagcccAGAgaaccacaggtgtacaccctgcccccatccAGAgaTgagCtgacca |
| | | | agaaccaggtcagcctgacctgcctggtcaaaggcttctatcccTCTgacatTgcTgt |
| | | | ggagtgggagagcaatgggcagccTgagaacaactacaagaccacAcctcTTgtgctg |
| | | | gactcTgaTggctccttcttcctctacagcaagctcacAgtggacaagagcaggtggc |
| | | | agcaggggaaTgtcttctcatgcTCTgtgatgcatgaggctctgcacaaccactacac |
| | | | CcagaagagcctctccctgtctccAggtaaaagaaagaggAGAgagggcagaggaagt |
| | | | cttctaacatgTggtgaTgtggaggagaatccTggccctATGGACATGAGGGTCCCTG |
| | | | CTCAGCTCCTGGGGCTCCTGCTGCTCTGGCTCTCAGGTGCCAGATGTgatatccagat |
| | | | gacccagtccccTagctccctgtcTgcctctgtgggAgatagggtcaccatcacctgc |
| | | | AGAgccagtcaggatgtgaatactgctgtagcctggtatcaacagaaaccaggaaaag |
| | | | ctccTaaactactgatttactcTgcatccttcctcTACtctggagtcccttctAGGtt |
| | | | ctctggatccagatctgggacTgatttcactctgaccatcagcagtctgcagccAgaa |
| | | | gacttTgcaacttattactgtcagcaacattatactactcctcccacTttTggacagg |
| | | | gtaccaaggtggagatcaaaAGAactgtggctgcaccatctgtcttcatcttcccAcc |
| | | | atctgatgagcagttgaaatctggaactgcctctgttgtgtgcctgctgaataacttc |
| | | | tatcccagagaggccaaagtacagtggaaggtggataaTgccctccaatcAggtaact |
| | | | cccaggagagtgtcacagagcaggacagcaaggacagcacctacagcctcagcagcac |
| | | | cctgacTctgagcaaagcagactaTgagaaacacaaagtctaTgcctgTgaagtcacc |
| | | | catcagggcctgagctcTccTgtcacaaagagcttcaacaggggagagtgttagtagt |
| | | | aactcgaggacggggtgaactacgcctgaggatccgatctttttccctctgccaaaaa |
| | | | ttatggggacatcatgaagccccttgagcatctgacttctggctaataaaggaaattt |
| | | | attttcattgcaatagtgtgttggaattttttgtgtctctcactcggcctaggtagat |
| | | | aagtagcatggcgggttaatcattaactacaaggaacccctagtgatggagttggcca |
| | | | ctccctctctgcgcgctcgctcgctcactgaggccgggcgaccaaaggtcgcccgacg |
| | | | cccgggctttgcccgggcggcctcagtgagcgagcgagcgcgcag |
| HER-90 | 3989 | 6502 | ctgcgcgctcgctcgctcactgaggccgcccgggcaaagcccgggcgtcgggcgacct |
| | | | ttggtcgcccggcctcagtgagcgagcgagcgcgcagagagggagtggccaactccat |
| | | | cactaggggttccttgtagttaatgattaacccgccatgctacttatctaccagggta |
| | | | atggggatcctctagaactatagctagtcgacattgattattgactagttattaatag |
| | | | taatcaattacggggtcattagttcatagcccatatatggagttccgcgttacataac |
| | | | ttacggtaaatggcccgcctggctgaccgcccaacgacccccgcccattgacgtcaat |
| | | | aatgacgtatgttcccatagtaacgccaatagggactttccattgacgtcaatgggtg |
| | | | gagtatttacggtaaactgcccacttggcagtacatcaagtgtatcatatgccaagta |
| | | | cgccccctattgacgtcaatgacggtaaatggcccgcctggcattatgcccagtacat |
| | | | gaccttatgggactttcctacttggcagtacatctacgtattagtcatcgctattacc |
| | | | atgtcgaggccacgttctgcttcactctccccatctcccccccctccccacccccaat |
| | | | tttgtatttatttattttttaattattttgtgcagcgatgggggcggggggggggggc |
| | | | gcgcgccaggcggggcggggcggggcgaggggcggggcggggcgaggcggagaggtgc |
| | | | ggcggcagccaatcagagcggcgcgctccgaaagtttccttttatggcgaggcggcgg |
| | | | cggcggcggccctataaaaagcgaagcgcgcggcgggcgggagcaagcttcgtttagt |
| | | | gaaccgtcagatcgcctggagacgccatccacgctgttttgacctccatagaagacac |
| | | | cgggaccgatccagcctccgcggattcgaatcccggccgggaacggtgcattggaacg |
| | | | cggattccccgtgccaagagtgacgtaagtaccgcctatagagtctataggcccacaa |
| | | | aaaatgctttcttcttttaatatacttttttgtttatcttatttctaatactttccct |
| | | | aatctctttctttcagggcaataatgatacaatgtatcatgcctctttgcaccattct |
| | | | aaagaataacagtgataatttctgggttaaggcaatagcaatatttctgcatataaat |
| | | | atttctgcatataaattgtaactgatgtaagaggtttcatattgctaatagcagctac |
| | | | aatccagctaccattctgcttttattttatggttgggataaggctggattattctgag |
| | | | tccaagctaggcccttttgctaatcatgttcatacctcttatcttcctcccacagctc |
| | | | ctgggcaacgtgctggtctgtgtgctggcccatcactttggcaaagaattgggattcg |
| | | | aaccggtgccgccaccATGGACTGGACCTGGAGGTTCCTCTTTGTGGTGGCAGCAGCT |
| | | | ACAGGTGTCCAGTCTgaggttcagctggtggagtctggAggtggcctggtgcagccag |
| | | | ggggctcactcAGAttgtcctgtgcagcttctggcttcaacattaaagacacctatat |
| | | | acactgggtgagacaggccccAggtaagggcctggaatgggttgcaaggatttatcct |
| | | | acCaatggttatactagatatgcTgatTCTgtcaagggcAGAttcactataTCTgcag |
| | | | acacatccaaaaacacagcctacctgcagatgaacagcctgAGAgctgaggacactgc |
| | | | TgtctattattgttctagatggggagggTGGggcttctatgctTTTGACCTGtggggt |
| | | | caaggaaccctggtcacAgtctcctcTgcCtcTaccaagggcccatcTgtcttccccc |
| | | | tggcaccctcctccaagagcacctctgggggcacagcTgccctgggctgcctggtcaa |
| | | | ggactacttcccTgaacctgtgacAgtctcCtggaactcaggAgccctgaccagTggA |
| | | | gtgcacaccttcccTgctgtcctacagtcctcaggactctactccctcagcTCTgtgg |
| | | | tgacAgtgccctccagcagcttgggcacccagacctacatctgcaaTgtgaatcacaa |
| | | | gcccagcaacaccaaggtggacaagaGagttgagcccaaatcttgtgacaaaactcac |
| | | | acatgcccaccTtgcccagcacctgaactGGtggggggaccAtcagtcttcctcCtcc |
| | | | ccccaaaacccaaggacaccctcatgatctccAGAacccctgaggtcacatgTgtggt |
| | | | ggtggaTgtgagccaTgaagaccctgaggtcaagttcaactggtaTgtggaTggAgtg |
| | | | gaggtgcataatgccaagacaaagccCcCTgaggagcagtacaacagcacTCTcAGAg |
| | | | tggtcTCTgtcctcacAgtcctgcaccaggactggctgaatggcaaggagtacaagtg |
| | | | caaggtctccaacaaagccctcccagcccccatTgagaaaaccatctccaaagccaaa |
| | | | gggcagcccAGAgaaccacaggtgtacaccctgcccccatccAGAgaTgagCtgacca |
| | | | agaaccaggtcagcctgacctgcctggtcaaaggcttctatcccTCTgacatTgcTgt |
| | | | ggagtgggagagcaatgggcagccTgagaacaactacaagaccacAcctcTTgtgctg |
| | | | gactcTgaTggctccttcttcctctacagcaagctcacAgtggacaagagcaggtggc |
| | | | agcaggggaaTgtcttctcatgcTCTgtgatgcatgaggctctgcacaaccactacac |
| | | | CcagaagagcctctccctgtctccAggtaaaagaaagaggAGAgagggcagaggaagt |
| | | | cttctaacatgTggtgaTgtggaggagaatccTggccctATGGACATGAGGGTCCCTG |
| | | | CTCAGCTCCTGGGGCTCCTGCTGCTCTGGCTCTCAGGTGCCAGATGTgatatccagat |
| | | | gacccagtccccTagctccctgtcTgcctctgtgggAgatagggtcaccatcacctgc |
| | | | AGAgccagtcaggatgtgaatactgctgtagcctggtatcaacagaaaccaggaaaag |
| | | | ctccTaaactactgatttactcTgcatccttcctcTACtctggagtcccttctAGGtt |
| | | | ctctggatccagatctgggacTgatttcactctgaccatcagcagtctgcagccAgaa |
| | | | gacttTgcaacttattactgtcagcaacattatactactcctcccacTttTggacagg |
| | | | gtaccaaggtggagatcaaaAGAactgtggctgcaccatctgtcttcatcttcccAcc |
| | | | atctgatgagcagttgaaatctggaactgcctctgttgtgtgcctgctgaataacttc |
| | | | tatcccagagaggccaaagtacagtggaaggtggataaTgccctccaatcAggtaact |
| | | | cccaggagagtgtcacagagcaggacagcaaggacagcacctacagcctcagcagcac |
| | | | cctgacTctgagcaaagcagactaTgagaaacacaaagtctaTgcctgTgaagtcacc |
| | | | catcagggcctgagctcTccTgtcacaaagagcttcaacaggggagagtgttagtagt |
| | | | aactcgaggacggggtgaactacgcctgaggatccgatctttttccctctgccaaaaa |
| | | | ttatggggacatcatgaagccccttgagcatctgacttctggctaataaaggaaattt |
| | | | attttcattgcaatagtgtgttggaattttttgtgtctctcactcggcctaggtagat |
| | | | aagtagcatggcgggttaatcattaactacaaggaacccctagtgatggagttggcca |
| | | | ctccctctctgcgcgctcgctcgctcactgaggccgggcgaccaaaggtcgcccgacg |
| | | | cccgggctttgcccgggcggcctcagtgagcgagcgagcgcgcag |
| HER-91 | 3989 | 6503 | ctgcgcgctcgctcgctcactgaggccgcccgggcaaagcccgggcgtcgggcgacct |
| | | | ttggtcgcccggcctcagtgagcgagcgagcgcgcagagagggagtggccaactccat |
| | | | cactaggggttccttgtagttaatgattaacccgccatgctacttatctaccagggta |
| | | | atggggatcctctagaactatagctagtcgacattgattattgactagttattaatag |
| | | | taatcaattacggggtcattagttcatagcccatatatggagttccgcgttacataac |
| | | | ttacggtaaatggcccgcctggctgaccgcccaacgacccccgcccattgacgtcaat |
| | | | aatgacgtatgttcccatagtaacgccaatagggactttccattgacgtcaatgggtg |
| | | | gagtatttacggtaaactgcccacttggcagtacatcaagtgtatcatatgccaagta |
| | | | cgccccctattgacgtcaatgacggtaaatggcccgcctggcattatgcccagtacat |
| | | | gaccttatgggactttcctacttggcagtacatctacgtattagtcatcgctattacc |
| | | | atgtcgaggccacgttctgcttcactctccccatctcccccccctccccacccccaat |
| | | | tttgtatttatttattttttaattattttgtgcagcgatgggggcggggggggggggc |
| | | | gcgcgccaggcggggcggggcggggcgaggggcggggcggggcgaggcggagaggtgc |
| | | | ggcggcagccaatcagagcggcgcgctccgaaagtttccttttatggcgaggcggcgg |
| | | | cggcggcggccctataaaaagcgaagcgcgcggcgggcgggagcaagcttcgtttagt |
| | | | gaaccgtcagatcgcctggagacgccatccacgctgttttgacctccatagaagacac |
| | | | cgggaccgatccagcctccgcggattcgaatcccggccgggaacggtgcattggaacg |
| | | | cggattccccgtgccaagagtgacgtaagtaccgcctatagagtctataggcccacaa |
| | | | aaaatgctttcttcttttaatatacttttttgtttatcttatttctaatactttccct |
| | | | aatctctttctttcagggcaataatgatacaatgtatcatgcctctttgcaccattct |
| | | | aaagaataacagtgataatttctgggttaaggcaatagcaatatttctgcatataaat |
| | | | atttctgcatataaattgtaactgatgtaagaggtttcatattgctaatagcagctac |
| | | | aatccagctaccattctgcttttattttatggttgggataaggctggattattctgag |
| | | | tccaagctaggcccttttgctaatcatgttcatacctcttatcttcctcccacagctc |
| | | | ctgggcaacgtgctggtctgtgtgctggcccatcactttggcaaagaattgggattcg |
| | | | aaccggtgccgccaccATGGACTGGACCTGGAGGTTCCTCTTTGTGGTGGCAGCAGCT |
| | | | ACAGGTGTCCAGTCTgaggttcagctggtggagtctggAggtggcctggtgcagccag |
| | | | ggggctcactcAGAttgtcctgtgcagcttctggcttcaacattaaagacacctatat |
| | | | acactgggtgagacaggccccAggtaagggcctggaatgggttgcaaggatttatcct |
| | | | acCaatggttatactagatatgcTgatTCTgtcaagggcAGAttcactataTCTgcag |
| | | | acacatccaaaaacacagcctacctgcagatgaacagcctgAGAgctgaggacactgc |
| | | | TgtctattattgttctagatggggagggTGGggcttctatgctATGGCCCTGtggggt |
| | | | caaggaaccctggtcacAgtctcctcTgcCtcTaccaagggcccatcTgtcttccccc |
| | | | tggcaccctcctccaagagcacctctgggggcacagcTgccctgggctgcctggtcaa |
| | | | ggactacttcccTgaacctgtgacAgtctcCtggaactcaggAgccctgaccagTggA |
| | | | gtgcacaccttcccTgctgtcctacagtcctcaggactctactccctcagcTCTgtgg |
| | | | tgacAgtgccctccagcagcttgggcacccagacctacatctgcaaTgtgaatcacaa |
| | | | gcccagcaacaccaaggtggacaagaGagttgagcccaaatcttgtgacaaaactcac |
| | | | acatgcccaccTtgcccagcacctgaactGGtggggggaccAtcagtcttcctcCtcc |
| | | | ccccaaaacccaaggacaccctcatgatctccAGAacccctgaggtcacatgTgtggt |
| | | | ggtggaTgtgagccaTgaagaccctgaggtcaagttcaactggtaTgtggaTggAgtg |
| | | | gaggtgcataatgccaagacaaagccCcCTgaggagcagtacaacagcacTCTcAGAg |
| | | | tggtcTCTgtcctcacAgtcctgcaccaggactggctgaatggcaaggagtacaagtg |
| | | | caaggtctccaacaaagccctcccagcccccatTgagaaaaccatctccaaagccaaa |
| | | | gggcagcccAGAgaaccacaggtgtacaccctgcccccatccAGAgaTgagCtgacca |
| | | | agaaccaggtcagcctgacctgcctggtcaaaggcttctatcccTCTgacatTgcTgt |
| | | | ggagtgggagagcaatgggcagccTgagaacaactacaagaccacAcctcTTgtgctg |
| | | | gactcTgaTggctccttcttcctctacagcaagctcacAgtggacaagagcaggtggc |
| | | | agcaggggaaTgtcttctcatgcTCTgtgatgcatgaggctctgcacaaccactacac |
| | | | CcagaagagcctctccctgtctccAggtaaaagaaagaggAGAgagggcagaggaagt |
| | | | cttctaacatgTggtgaTgtggaggagaatccTggccctATGGACATGAGGGTCCCTG |
| | | | CTCAGCTCCTGGGGCTCCTGCTGCTCTGGCTCTCAGGTGCCAGATGTgatatccagat |
| | | | gacccagtccccTagctccctgtcTgcctctgtgggAgatagggtcaccatcacctgc |
| | | | AGAgccagtcaggatgtgaatactgctgtagcctggtatcaacagaaaccaggaaaag |
| | | | ctccTaaactactgatttactcTgcatccttcctcTACtctggagtcccttctAGGtt |
| | | | ctctggatccagatctgggacTgatttcactctgaccatcagcagtctgcagccAgaa |
| | | | gacttTgcaacttattactgtcagcaacattatactactcctcccacTttTggacagg |
| | | | gtaccaaggtggagatcaaaAGAactgtggctgcaccatctgtcttcatcttcccAcc |
| | | | atctgatgagcagttgaaatctggaactgcctctgttgtgtgcctgctgaataacttc |
| | | | tatcccagagaggccaaagtacagtggaaggtggataaTgccctccaatcAggtaact |
| | | | cccaggagagtgtcacagagcaggacagcaaggacagcacctacagcctcagcagcac |
| | | | cctgacTctgagcaaagcagactaTgagaaacacaaagtctaTgcctgTgaagtcacc |
| | | | catcagggcctgagctcTccTgtcacaaagagcttcaacaggggagagtgttagtagt |
| | | | aactcgaggacggggtgaactacgcctgaggatccgatctttttccctctgccaaaaa |
| | | | ttatggggacatcatgaagccccttgagcatctgacttctggctaataaaggaaattt |
| | | | attttcattgcaatagtgtgttggaattttttgtgtctctcactcggcctaggtagat |
| | | | aagtagcatggcgggttaatcattaactacaaggaacccctagtgatggagttggcca |
| | | | ctccctctctgcgcgctcgctcgctcactgaggccgggcgaccaaaggtcgcccgacg |
| | | | cccgggctttgcccgggcggcctcagtgagcgagcgagcgcgcag |
| HER-92 | 3989 | 6504 | ctgcgcgctcgctcgctcactgaggccgcccgggcaaagcccgggcgtcgggcgacct |
| | | | ttggtcgcccggcctcagtgagcgagcgagcgcgcagagagggagtggccaactccat |
| | | | cactaggggttccttgtagttaatgattaacccgccatgctacttatctaccagggta |
| | | | atggggatcctctagaactatagctagtcgacattgattattgactagttattaatag |
| | | | taatcaattacggggtcattagttcatagcccatatatggagttccgcgttacataac |
| | | | ttacggtaaatggcccgcctggctgaccgcccaacgacccccgcccattgacgtcaat |
| | | | aatgacgtatgttcccatagtaacgccaatagggactttccattgacgtcaatgggtg |
| | | | gagtatttacggtaaactgcccacttggcagtacatcaagtgtatcatatgccaagta |
| | | | cgccccctattgacgtcaatgacggtaaatggcccgcctggcattatgcccagtacat |
| | | | gaccttatgggactttcctacttggcagtacatctacgtattagtcatcgctattacc |
| | | | atgtcgaggccacgttctgcttcactctccccatctcccccccctccccacccccaat |
| | | | tttgtatttatttattttttaattattttgtgcagcgatgggggcggggggggggggc |
| | | | gcgcgccaggcggggcggggcggggcgaggggcggggcggggcgaggcggagaggtgc |
| | | | ggcggcagccaatcagagcggcgcgctccgaaagtttccttttatggcgaggcggcgg |
| | | | cggcggcggccctataaaaagcgaagcgcgcggcgggcgggagcaagcttcgtttagt |
| | | | gaaccgtcagatcgcctggagacgccatccacgctgttttgacctccatagaagacac |
| | | | cgggaccgatccagcctccgcggattcgaatcccggccgggaacggtgcattggaacg |
| | | | cggattccccgtgccaagagtgacgtaagtaccgcctatagagtctataggcccacaa |
| | | | aaaatgctttcttcttttaatatacttttttgtttatcttatttctaatactttccct |
| | | | aatctctttctttcagggcaataatgatacaatgtatcatgcctctttgcaccattct |
| | | | aaagaataacagtgataatttctgggttaaggcaatagcaatatttctgcatataaat |
| | | | atttctgcatataaattgtaactgatgtaagaggtttcatattgctaatagcagctac |
| | | | aatccagctaccattctgcttttattttatggttgggataaggctggattattctgag |
| | | | tccaagctaggcccttttgctaatcatgttcatacctcttatcttcctcccacagctc |
| | | | ctgggcaacgtgctggtctgtgtgctggcccatcactttggcaaagaattgggattcg |
| | | | aaccggtgccgccaccATGGACTGGACCTGGAGGTTCCTCTTTGTGGTGGCAGCAGCT |
| | | | ACAGGTGTCCAGTCTgaggttcagctggtggagtctggAggtggcctggtgcagccag |
| | | | ggggctcactcAGAttgtcctgtgcagcttctggcttcaacattaaagacacctatat |
| | | | acactgggtgagacaggccccAggtaagggcctggaatgggttgcaaggatttatcct |
| | | | acCaatggttatactagatatgcTgatTCTgtcaagggcAGAttcactataTCTgcag |
| | | | acacatccaaaaacacagcctacctgcagatgaacagcctgAGAgctgaggacactgc |
| | | | TgtctattattgttctagatggggagggGATggcttctatgctTTTGCCCTGtggggt |
| | | | caaggaaccctggtcacAgtctcctcTgcCtcTaccaagggcccatcTgtcttccccc |
| | | | tggcaccctcctccaagagcacctctgggggcacagcTgccctgggctgcctggtcaa |
| | | | ggactacttcccTgaacctgtgacAgtctcCtggaactcaggAgccctgaccagTggA |
| | | | gtgcacaccttcccTgctgtcctacagtcctcaggactctactccctcagcTCTgtgg |
| | | | tgacAgtgccctccagcagcttgggcacccagacctacatctgcaaTgtgaatcacaa |
| | | | gcccagcaacaccaaggtggacaagaGagttgagcccaaatcttgtgacaaaactcac |
| | | | acatgcccaccTtgcccagcacctgaactGGtggggggaccAtcagtcttcctcCtcc |
| | | | ccccaaaacccaaggacaccctcatgatctccAGAacccctgaggtcacatgTgtggt |
| | | | ggtggaTgtgagccaTgaagaccctgaggtcaagttcaactggtaTgtggaTggAgtg |
| | | | gaggtgcataatgccaagacaaagccCcCTgaggagcagtacaacagcacTCTcAGAg |
| | | | tggtcTCTgtcctcacAgtcctgcaccaggactggctgaatggcaaggagtacaagtg |
| | | | caaggtctccaacaaagccctcccagcccccatTgagaaaaccatctccaaagccaaa |
| | | | gggcagcccAGAgaaccacaggtgtacaccctgcccccatccAGAgaTgagCtgacca |
| | | | agaaccaggtcagcctgacctgcctggtcaaaggcttctatcccTCTgacatTgcTgt |
| | | | ggagtgggagagcaatgggcagccTgagaacaactacaagaccacAcctcTTgtgctg |
| | | | gactcTgaTggctccttcttcctctacagcaagctcacAgtggacaagagcaggtggc |
| | | | agcaggggaaTgtcttctcatgcTCTgtgatgcatgaggctctgcacaaccactacac |
| | | | CcagaagagcctctccctgtctccAggtaaaagaaagaggAGAgagggcagaggaagt |
| | | | cttctaacatgTggtgaTgtggaggagaatccTggccctATGGACATGAGGGTCCCTG |
| | | | CTCAGCTCCTGGGGCTCCTGCTGCTCTGGCTCTCAGGTGCCAGATGTgatatccagat |
| | | | gacccagtccccTagctccctgtcTgcctctgtgggAgatagggtcaccatcacctgc |
| | | | AGAgccagtcaggatgtgaatactgctgtagcctggtatcaacagaaaccaggaaaag |
| | | | ctccTaaactactgatttactcTgcatccttcctcTACtctggagtcccttctAGGtt |
| | | | ctctggatccagatctgggacTgatttcactctgaccatcagcagtctgcagccAgaa |
| | | | gacttTgcaacttattactgtcagcaacattatactactcctcccacTttTggacagg |
| | | | gtaccaaggtggagatcaaaAGAactgtggctgcaccatctgtcttcatcttcccAcc |
| | | | atctgatgagcagttgaaatctggaactgcctctgttgtgtgcctgctgaataacttc |
| | | | tatcccagagaggccaaagtacagtggaaggtggataaTgccctccaatcAggtaact |
| | | | cccaggagagtgtcacagagcaggacagcaaggacagcacctacagcctcagcagcac |
| | | | cctgacTctgagcaaagcagactaTgagaaacacaaagtctaTgcctgTgaagtcacc |
| | | | catcagggcctgagctcTccTgtcacaaagagcttcaacaggggagagtgttagtagt |
| | | | aactcgaggacggggtgaactacgcctgaggatccgatctttttccctctgccaaaaa |
| | | | ttatggggacatcatgaagccccttgagcatctgacttctggctaataaaggaaattt |
| | | | attttcattgcaatagtgtgttggaattttttgtgtctctcactcggcctaggtagat |
| | | | aagtagcatggcgggttaatcattaactacaaggaacccctagtgatggagttggcca |
| | | | ctccctctctgcgcgctcgctcgctcactgaggccgggcgaccaaaggtcgcccgacg |
| | | | cccgggctttgcccgggcggcctcagtgagcgagcgagcgcgcag |
| HER-93 | 4047 | 6611 | ctgcgcgctcgctcgctcactgaggccgcccgggcaaagcccgggcgtcgggcgacct |
| | | | ttggtcgcccggcctcagtgagcgagcgagcgcgcagagagggagtggccaactccat |
| | | | cactaggggttccttgtagttaatgattaacccgccatgctacttatctaccagggta |
| | | | atggggatcctctagaactatagctagtcgacataacgcgtgatctaacatatcctgg |
| | | | tgtggagtagcggacgctgctatgacagaggctcgggggcctgagctggctctgtgag |
| | | | ctggggaggaggcagacagccaggccttgtctgcaagcagacctggcagcattgggct |
| | | | ggccgccccccagggcctcctcttcatgcccagtgaatgactcaccttggcacagaca |
| | | | caatgttcggggtgggcacagtgcctgcttcccgccgcaccccagcccccctcaaatg |
| | | | ccttccgagaagcccattgagcagggggcttgcattgcaccccagcctgacagcctgg |
| | | | catcttgggataaaagcagcacagccccctaggggctgcccttgctgtgtggcgccac |
| | | | cggcggtggagaacaaggctctattcagcctgtgcccaggaaaggggatcaggggatg |
| | | | cccaggcatggacagtgggtggcagggggggagaggagggctgtctgcttcccagaag |
| | | | tccaaggacacaaatgggtgaggggagagctctccccatagctgggctgcggcccaac |
| | | | cccaccccctcaggctatgccagggggtgttgccaggggcacccgggcatcgccagtc |
| | | | tagcccactccttcataaagccctcgcatcccaggagcgagcagagccagagcaggtt |
| | | | ggagaggagacgcatcacctccgctgctcgcggggatcctctagaagcttcgtttagt |
| | | | gaaccgtcagatcgcctggagacgccatccacgctgttttgacctccatagaagacac |
| | | | cgggaccgatccagcctccgcggattcgaatcccggccgggaacggtgcattggaacg |
| | | | cggattccccgtgccaagagtgacgtaagtaccgcctatagagtctataggcccacaa |
| | | | aaaatgctttcttcttttaatatactttttttgttatcttatttctaatactttccct |
| | | | aatctctttctttcagggcaataatgatacaatgtatcatgcctctttgcaccattct |
| | | | aaagaataacagtgataatttctgggttaaggcaatagcaatatttctgcatataaat |
| | | | atttctgcatataaattgtaactgatgtaagaggtttcatattgctaatagcagctac |
| | | | aatccagctaccattctgcttttattttatggttgggataaggctggattattctgag |
| | | | tccaagctaggcccttttgctaatcatgttcatacctcttatcttcctcccacagctc |
| | | | ctgggcaacgtgctggtctgtgtgctggcccatcactttggcaaagaattgggattcg |
| | | | aaccggtgccgccaccATGGACTGGACCTGGAGGTTCCTCTTTGTGGTGGCAGCAGCT |
| | | | ACAGGTGTCCAGTCTgaggttcagctggtggagtctggAggtggcctggtgcagccag |
| | | | ggggctcactcAGAttgtcctgtgcagcttctggcttcaacattaaagacacctatat |
| | | | acactgggtgagacaggccccAggtaagggcctggaatgggttgcaaggatttatcct |
| | | | acCaatggttatactagatatgcTgatTCTgtcaagggcAGAttcactataTCTgcag |
| | | | acacatccaaaaacacagcctacctgcagatgaacagcctgAGAgctgaggacactgc |
| | | | TgtctattattgttctagatggggaggggaTggcttctatgctatggacTACtggggt |
| | | | caaggaaccctggtcacAgtctcctcTgcCtcTaccaagggcccatcTgtcttccccc |
| | | | tggcaccctcctccaagagcacctctgggggcacagcTgccctgggctgcctggtcaa |
| | | | ggactacttcccTgaacctgtgacAgtctcCtggaactcaggAgccctgaccagTggA |
| | | | gtgcacaccttcccTgctgtcctacagtcctcaggactctactccctcagcTCTgtgg |
| | | | tgacAgtgccctccagcagcttgggcacccagacctacatctgcaaTgtgaatcacaa |
| | | | gcccagcaacaccaaggtggacaagaGagttgagcccaaatcttgtgacaaaactcac |
| | | | acatgcccaccTtgcccagcacctgaactGGtggggggaccAtcagtcttcctcCtcc |
| | | | ccccaaaacccaaggacaccctcatgatctccAGAacccctgaggtcacatgTgtggt |
| | | | ggtggaTgtgagccaTgaagaccctgaggtcaagttcaactggtaTgtggaTggAgtg |
| | | | gaggtgcataatgccaagacaaagccCcCTgaggagcagtacaacagcacTCTcAGAg |
| | | | tggtcTCTgtcctcacAgtcctgcaccaggactggctgaatggcaaggagtacaagtg |
| | | | caaggtctccaacaaagccctcccagcccccatTgagaaaaccatctccaaagccaaa |
| | | | gggcagcccAGAgaaccacaggtgtacaccctgcccccatccAGAgaTgagCtgacca |
| | | | agaaccaggtcagcctgacctgcctggtcaaaggcttctatcccTCTgacatTgcTgt |
| | | | ggagtgggagagcaatgggcagccTgagaacaactacaagaccacAcctcTTgtgctg |
| | | | gactcTgaTggctccttcttcctctacagcaagctcacAgtggacaagagcaggtggc |
| | | | agcaggggaaTgtcttctcatgcTCTgtgatgcatgaggctctgcacaaccactacac |
| | | | CcagaagagcctctccctgtctccAggtaaaagaaagaggAGAgagggcagaggaagt |
| | | | cttctaacatgTggtgaTgtggaggagaatccTggccctATGGACATGAGGGTCCCTG |
| | | | CTCAGCTCCTGGGGCTCCTGCTGCTCTGGCTCTCAGGTGCCAGATGTgatatccagat |
| | | | gacccagtccccTagctccctgtcTgcctctgtgggAgatagggtcaccatcacctgc |
| | | | AGAgccagtcaggatgtgaatactgctgtagcctggtatcaacagaaaccaggaaaag |
| | | | ctccTaaactactgatttactcTgcatccttcctcTACtctggagtcccttctAGGtt |
| | | | ctctggatccagatctgggacTgatttcactctgaccatcagcagtctgcagccAgaa |
| | | | gacttTgcaacttattactgtcagcaacattatactactcctcccacTttTggacagg |
| | | | gtaccaaggtggagatcaaaAGAactgtggctgcaccatctgtcttcatcttcccAcc |
| | | | atctgatgagcagttgaaatctggaactgcctctgttgtgtgcctgctgaataacttc |
| | | | tatcccagagaggccaaagtacagtggaaggtggataaTgccctccaatcAggtaact |
| | | | cccaggagagtgtcacagagcaggacagcaaggacagcacctacagcctcagcagcac |
| | | | cctgacTctgagcaaagcagactaTgagaaacacaaagtctaTgcctgTgaagtcacc |
| | | | catcagggcctgagctcTccTgtcacaaagagcttcaacaggggagagtgttagtagt |
| | | | aactcgaggacggggtgaactacgcctgaggatccgatctttttccctctgccaaaaa |
| | | | ttatggggacatcatgaagccccttgagcatctgacttctggctaataaaggaaattt |
| | | | attttcattgcaatagtgtgttggaattttttgtgtctctcactcggcctaggtagat |
| | | | aagtagcatggcgggttaatcattaactacaaggaacccctagtgatggagttggcca |
| | | | ctccctctctgcgcgctcgctcgctcactgaggccgggcgaccaaaggtcgcccgacg |
| | | | cccgggctttgcccgggggcctcagtgagcgagcgagcgcgcag |
| HER-97 | 4739 | 6505 | ctgcgcgctcgctcgctcactgaggccgcccgggcaaagcccgggcgtcgggcgacct |
| | | | ttggtcgcccggcctcagtgagcgagcgagcgcgcagagagggagtggccaactccat |
| | | | cactaggggttccttgtagttaatgattaacccgccatgctacttatctaccagggta |
| | | | atggggatcctctagaactatagctagtcgacattgattattgactagttattaatag |
| | | | taatcaattacggggtcattagttcatagcccatatatggagttccgcgttacataac |
| | | | ttacggtaaatggcccgcctggctgaccgcccaacgacccccgcccattgacgtcaat |
| | | | aatgacgtatgttcccatagtaacgccaatagggactttccattgacgtcaatgggtg |
| | | | gagtatttacggtaaactgcccacttggcagtacatcaagtgtatcatatgccaagta |
| | | | cgccccctattgacgtcaatgacggtaaatggcccgcctggcattatgcccagtacat |
| | | | gaccttatgggactttcctacttggcagtacatctacgtattagtcatcgctattacc |
| | | | atgtcgaggccacgttctgcttcactctccccatctcccccccctccccacccccaat |
| | | | tttgtatttatttattttttaattattttgtgcagcgatgggggcggggggggggggc |
| | | | gcgcgccaggcggggcggggcggggcgaggggcggggcggggcgaggcggagaggtgc |
| | | | ggcggcagccaatcagagcggcgcgctccgaaagtttccttttatggcgaggcggcgg |
| | | | cggcggcggccctataaaaagcgaagcgcgcggcgggcgggagcaagcttcgtttagt |
| | | | gaaccgtcagatcgcctggagacgccatccacgctgttttgacctccatagaagacac |
| | | | cgggaccgatccagcctccgcggattcgaatcccggccgggaacggtgcattggaacg |
| | | | cggattccccgtgccaagagtgacgtaagtaccgcctatagagtctataggcccacaa |
| | | | aaaatgctttcttcttttaatatacttttttgtttatcttatttctaatactttccct |
| | | | aatctctttctttcagggcaataatgatacaatgtatcatgcctctttgcaccattct |
| | | | aaagaataacagtgataatttctgggttaaggcaatagcaatatttctgcatataaat |
| | | | atttctgcatataaattgtaactgatgtaagaggtttcatattgctaatagcagctac |
| | | | aatccagctaccattctgcttttattttatggttgggataaggctggattattctgag |
| | | | tccaagctaggcccttttgctaatcatgttcatacctcttatcttcctcccacagctc |
| | | | ctgggcaacgtgctggtctgtgtgctggcccatcactttggcaaagaattgggattcg |
| | | | aaccggtgccgccaccATGGACTGGACCTGGAGGTTCCTCTTTGTGGTGGCAGCAGCT |
| | | | ACAGGTGTCCAGTCCCAAgttcagctggtgCAGtctggTGCAGAAGTTAAGAAGccag |
| | | | ggGCAtcaGTAAAGGTGTCCtgCAAGgcttctggcTACTCTTTCACTGGGTATTTCat |
| | | | aAATtgggtgAGAGAGgccccCGGCCAGggcctggaatggATGGGCCATattTCCTCC |
| | | | TCTTATGCAACTTCTACAtatAACCAGAAGTTTCAGggcAGAGTCactTTCACTGTGg |
| | | | acacatccAGCTCTacagcctacATGGAGCTGTCAagcctgAGATCTgaggacactgc |
| | | | agtctattattgtGTGagaAGTggaAACTAtGAAGAGTATgctatggacTACtggggt |
| | | | caaggaaccctggtcacAgtctcctcAgcCtcTaccaagggcccatcTgtcttccccc |
| | | | tggcaccctcctccaagagcacctctgggggcacagcTgccctgggctgcctggtcaa |
| | | | ggactacttcccTgaacctgtgacAgtctcCtggaactcaggAgccctgaccagTggA |
| | | | gtgcacaccttcccTgctgtcctacagtcctcaggactctactccctcagcTCTgtgg |
| | | | tgacAgtgccctccagcagcttgggcacccagacctacatctgcaaTgtgaatcacaa |
| | | | gcccagcaacaccaaggtggacaagaGagttgagcccaaatcttgtgacaaaactcac |
| | | | acatgcccaccTtgcccagcacctgaactGGtggggggaccAtcagtcttcctcCtcc |
| | | | ccccaaaacccaaggacaccctcatgatctccAGAacccctgaggtcacatgTgtggt |
| | | | ggtggaTgtgagccaTgaagaccctgaggtcaagttcaactggtaTgtggaTggAgtg |
| | | | gaggtgcataatgccaagacaaagccCcCTgaggagcagtacaacagcacTCTcAGAg |
| | | | tggtcTCTgtcctcacAgtcctgcaccaggactggctgaatggcaaggagtacaagtg |
| | | | caaggtctccaacaaagccctcccagcccccatTgagaaaaccatctccaaagccaaa |
| | | | gggcagcccAGAgaaccacaggtgtacaccctgcccccatccAGAgaTgagCtgacca |
| | | | agaaccaggtcagcctgacctgcctggtcaaaggcttctatcccTCTgacatTgcTgt |
| | | | ggagtgggagagcaatgggcagccTgagaacaactacaagaccacAcctcTTgtgctg |
| | | | gactcTgaTggctccttcttcctctacagcaagctcacAgtggacaagagcaggtggc |
| | | | agcaggggaaTgtcttctcatgcTCTgtgatgcatgaggctctgcacaaccactacac |
| | | | CcagaagagcctctccctgtctccAggtaaaagaaagaggAGAgagggcagaggaagt |
| | | | cttctaacatgTggtgaTgtggaggagaatccTggccctATGGACATGAGGGTCCCTG |
| | | | CTCAGCTCCTGGGGCTCCTGCTGCTCTGGCTCTCAGGTGCCAGATGTgaggttcagct |
| | | | ggtggagtctggTggtggcctGgtgcagccagggggctcactcAGAttgtcctgtgca |
| | | | gcttctggcttcaacattaaagacacctatatacactgggtgAGAcaggccccTggAa |
| | | | agggcctggaatgggttgcaaggatttatcctacTaatggttatactagatatgcAga |
| | | | tagTgtcaagggcAGAttcactataagTgcagacacatccaaaaacacagcctacctg |
| | | | cagatgaacagcctgAGAgctgaggacactgcAgtctattattgttctagatggggag |
| | | | ggTGGggcttctatgctTTTGCCCTGtggggtcaaggaaccctggtcacAgtctcctc |
| | | | TggtggtggtggatcTggaggaggaggaAGTggaggtggaggtTCTgatatccagatg |
| | | | acccagtccccAagctccctgtcTgcctctgtgggGgatagggtcaccatcacctgcA |
| | | | GAgccagtcaggatgtgaatactgctgtagcctggtatcaacagaaaccaggaaaagc |
| | | | tccCaaactactgatttactcTgcatccttcctcTACtctggagtcccttctAGAttc |
| | | | tctggatccagatctggCacTgaCttcactctgaccatcagTagtctgcagccTgaag |
| | | | acttTgcaacttattactgtcaAcaacattatactactcctcccacCttTggacaggg |
| | | | taccaaggtggagatcaaaGGCTCTgatatTGTACTGacccagtccccTGACtccctg |
| | | | GCTGTGtctCTGggGGAAaggGCAaccatcAACtgcAGGAGTagtcagACCCTTCTGT |
| | | | ACTCTAATAACCAGAAAAACTACCTGgcctggtatcaaAAAaaaccaggaCAGCCTcc |
| | | | TaaactactgattAGTTGGgcaTTCACTAGGAAGtctggagtccctGACAGGttctct |
| | | | ggatcTGGGtcTggAacAgatttcacActgaccatcagcagtctgcagGCTgaagaTG |
| | | | TTgcaGTCtaCtactgtcagcaaTACTCAAACTACcctTGGacTttTggacagggGac |
| | | | caaAgtggagatcaaaAGGactgtCgctgcaccatctgtcttcatcttcccAccatct |
| | | | gatgagcagttgaaatctggaactgcctctgttAAGtgcctgctgaataacttctatc |
| | | | ccagagaggccaaagtacagtggaaggtggataaTgccctccaaAGTggtaactccca |
| | | | ggagagtgtcacagagcaggacagcaaggacagcacctacagcctcagcagcaccctg |
| | | | acCctgagcaaagcagactaTgagaaacacaaagtctaTgcctgTgaagtcacccatc |
| | | | agggcctgagcAGCccAgtcacaaagagcttcaacaggggagagtgttagtagtaact |
| | | | cgaggacggggtgaactacgcctgaggatccgatctttttccctctgccaaaaattat |
| | | | ggggacatcatgaagccccttgagcatctgacttctggctaataaaggaaatttattt |
| | | | tcattgcaatagtgtgttggaattttttgtgtctctcactcggcctaggtagataagt |
| | | | agcatggcgggttaatcattaactacaaggaacccctagtgatggagttggccactcc |
| | | | ctctctgcgcgctcgctcgctcactgaggccgggcgaccaaaggtcgcccgacgcccg |
| | | | ggctttgcccgggcggcctcagtgagcgagcgagcgcgcag |
| HER-98 | 4739 | 6506 | ctgcgcgctcgctcgctcactgaggccgcccgggcaaagcccgggcgtcgggcgacct |
| | | | ttggtcgcccggcctcagtgagcgagcgagcgcgcagagagggagtggccaactccat |
| | | | cactaggggttccttgtagttaatgattaacccgccatgctacttatctaccagggta |
| | | | atggggatcctctagaactatagctagtcgacattgattattgactagttattaatag |
| | | | taatcaattacggggtcattagttcatagcccatatatggagttccgcgttacataac |
| | | | ttacggtaaatggcccgcctggctgaccgcccaacgacccccgcccattgacgtcaat |
| | | | aatgacgtatgttcccatagtaacgccaatagggactttccattgacgtcaatgggtg |
| | | | gagtatttacggtaaactgcccacttggcagtacatcaagtgtatcatatgccaagta |
| | | | cgccccctattgacgtcaatgacggtaaatggcccgcctggcattatgcccagtacat |
| | | | gaccttatgggactttcctacttggcagtacatctacgtattagtcatcgctattacc |
| | | | atgtcgaggccacgttctgcttcactctccccatctcccccccctccccacccccaat |
| | | | tttgtatttatttattttttaattattttgtgcagcgatgggggcggggggggggggc |
| | | | gcgcgccaggcggggcggggcggggcgaggggcggggcggggcgaggcggagaggtgc |
| | | | ggcggcagccaatcagagcggcgcgctccgaaagtttccttttatggcgaggcggcgg |
| | | | cggcggcggccctataaaaagcgaagcgcgcggcgggcgggagcaagcttcgtttagt |
| | | | gaaccgtcagatcgcctggagacgccatccacgctgttttgacctccatagaagacac |
| | | | cgggaccgatccagcctccgcggattcgaatcccggccgggaacggtgcattggaacg |
| | | | cggattccccgtgccaagagtgacgtaagtaccgcctatagagtctataggcccacaa |
| | | | aaaatgctttcttcttttaatatacttttttgtttatcttatttctaatactttccct |
| | | | aatctctttctttcagggcaataatgatacaatgtatcatgcctctttgcaccattct |
| | | | aaagaataacagtgataatttctgggttaaggcaatagcaatatttctgcatataaat |
| | | | atttctgcatataaattgtaactgatgtaagaggtttcatattgctaatagcagctac |
| | | | aatccagctaccattctgcttttattttatggttgggataaggctggattattctgag |
| | | | tccaagctaggcccttttgctaatcatgttcatacctcttatcttcctcccacagctc |
| | | | ctgggcaacgtgctggtctgtgtgctggcccatcactttggcaaagaattgggattcg |
| | | | aaccggtgccgccaccATGGACTGGACCTGGAGGTTCCTCTTTGTGGTGGCAGCAGCT |
| | | | ACAGGTGTCCAGTCCCAAgttcagctggtgCAGtctggTGCAGAAGTTAAGAAGccag |
| | | | ggGCAtcaGTAAAGGTGTCCtgCAAGgcttctggcTACTCTTTCACTGGGTATTTCat |
| | | | aAATtgggtgAGAGAGgccccCGGCCAGggcctggaatggATGGGCCATattTCCTCC |
| | | | TCTTATGCAACTTCTACAtatAACCAGAAGTTTCAGggcAGAGTCactTTCACTGTGg |
| | | | acacatccAGCTCTacagcctacATGGAGCTGTCAagcctgAGATCTgaggacactgc |
| | | | agtctattattgtGTGagaAGTggaAACTAtGAAGAGTATgctatggacTACtggggt |
| | | | caaggaaccctggtcacAgtctcctcAgcCtcTaccaagggcccatcTgtcttccccc |
| | | | tggcaccctcctccaagagcacctctgggggcacagcTgccctgggctgcctggtcaa |
| | | | ggactacttcccTgaacctgtgacAgtctcCtggaactcaggAgccctgaccagTggA |
| | | | gtgcacaccttcccTgctgtcctacagtcctcaggactctactccctcagcTCTgtgg |
| | | | tgacAgtgccctccagcagcttgggcacccagacctacatctgcaaTgtgaatcacaa |
| | | | gcccagcaacaccaaggtggacaagaGagttgagcccaaatcttgtgacaaaactcac |
| | | | acatgcccaccTtgcccagcacctgaactGGtggggggaccAtcagtcttcctcCtcc |
| | | | ccccaaaacccaaggacaccctcatgatctccAGAacccctgaggtcacatgTgtggt |
| | | | ggtggaTgtgagccaTgaagaccctgaggtcaagttcaactggtaTgtggaTggAgtg |
| | | | gaggtgcataatgccaagacaaagccCcCTgaggagcagtacaacagcacTCTcAGAg |
| | | | tggtcTCTgtcctcacAgtcctgcaccaggactggctgaatggcaaggagtacaagtg |
| | | | caaggtctccaacaaagccctcccagcccccatTgagaaaaccatctccaaagccaaa |
| | | | gggcagcccAGAgaaccacaggtgtacaccctgcccccatccAGAgaTgagCtgacca |
| | | | agaaccaggtcagcctgacctgcctggtcaaaggcttctatcccTCTgacatTgcTgt |
| | | | ggagtgggagagcaatgggcagccTgagaacaactacaagaccacAcctcTTgtgctg |
| | | | gactcTgaTggctccttcttcctctacagcaagctcacAgtggacaagagcaggtggc |
| | | | agcaggggaaTgtcttctcatgcTCTgtgatgcatgaggctctgcacaaccactacac |
| | | | CcagaagagcctctccctgtctccAggtaaaagaaagaggAGAgagggcagaggaagt |
| | | | cttctaacatgTggtgaTgtggaggagaatccTggccctATGGACATGAGGGTCCCTG |
| | | | CTCAGCTCCTGGGGCTCCTGCTGCTCTGGCTCTCAGGTGCCAGATGTgaggttcagct |
| | | | ggtggagtctggTggtggcctGgtgcagccagggggctcactcAGAttgtcctgtgca |
| | | | gcttctggcttcaacattaaagacacctatatacactgggtgAGAcaggccccTggAa |
| | | | agggcctggaatgggttgcaaggatttatcctacTaatggttatactagatatgcAga |
| | | | tagTgtcaagggcAGAttcactataagTgcagacacatccaaaaacacagcctacctg |
| | | | cagatgaacagcctgAGAgctgaggacactgcAgtctattattgttctagatggggag |
| | | | ggTGGggcttctatgctTTTGCCTACtggggtcaaggaaccctggtcacAgtctcctc |
| | | | TggtggtggtggatcTggaggaggaggaAGTggaggtggaggtTCTgatatccagatg |
| | | | acccagtccccAagctccctgtcTgcctctgtgggGgatagggtcaccatcacctgcA |
| | | | GAgccagtcaggatgtgaatactgctgtagcctggtatcaacagaaaccaggaaaagc |
| | | | tccCaaactactgatttactcTgcatccttcctcTACtctggagtcccttctAGAttc |
| | | | tctggatccagatctggCacTgaCttcactctgaccatcagTagtctgcagccTgaag |
| | | | acttTgcaacttattactgtcaAcaacattatactactcctcccacCttTggacaggg |
| | | | taccaaggtggagatcaaaGGCTCTgatatTGTACTGacccagtccccTGACtccctg |
| | | | GCTGTGtctCTGggGGAAaggGCAaccatcAACtgcAGGAGTagtcagACCCTTCTGT |
| | | | ACTCTAATAACCAGAAAAACTACCTGgcctggtatcaaAAAaaaccaggaCAGCCTcc |
| | | | TaaactactgattAGTTGGgcaTTCACTAGGAAGtctggagtccctGACAGGttctct |
| | | | ggatcTGGGtcTggAacAgatttcacActgaccatcagcagtctgcagGCTgaagaTG |
| | | | TTgcaGTCtaCtactgtcagcaaTACTCAAACTACcctTGGacTttTggacagggGac |
| | | | caaAgtggagatcaaaAGGactgtCgctgcaccatctgtcttcatcttcccAccatct |
| | | | gatgagcagttgaaatctggaactgcctctgttAAGtgcctgctgaataacttctatc |
| | | | ccagagaggccaaagtacagtggaaggtggataaTgccctccaaAGTggtaactccca |
| | | | ggagagtgtcacagagcaggacagcaaggacagcacctacagcctcagcagcaccctg |
| | | | acCctgagcaaagcagactaTgagaaacacaaagtctaTgcctgTgaagtcacccatc |
| | | | agggcctgagcAGCccAgtcacaaagagcttcaacaggggagagtgttagtagtaact |
| | | | cgaggacggggtgaactacgcctgaggatccgatctttttccctctgccaaaaattat |
| | | | ggggacatcatgaagccccttgagcatctgacttctggctaataaaggaaatttattt |
| | | | tcattgcaatagtgtgttggaattttttgtgtctctcactcggcctaggtagataagt |
| | | | agcatggcgggttaatcattaactacaaggaacccctagtgatggagttggccactcc |
| | | | ctctctgcgcgctcgctcgctcactgaggccgggcgaccaaaggtcgcccgacgcccg |
| | | | ggctttgcccgggcggcctcagtgagcgagcgagcgcgcag |
| HER-99 | 4739 | 6507 | ctgcgcgctcgctcgctcactgaggccgcccgggcaaagcccgggcgtcgggcgacct |
| | | | ttggtcgcccggcctcagtgagcgagcgagcgcgcagagagggagtggccaactccat |
| | | | cactaggggttccttgtagttaatgattaacccgccatgctacttatctaccagggta |
| | | | atggggatcctctagaactatagctagtcgacattgattattgactagttattaatag |
| | | | taatcaattacggggtcattagttcatagcccatatatggagttccgcgttacataac |
| | | | ttacggtaaatggcccgcctggctgaccgcccaacgacccccgcccattgacgtcaat |
| | | | aatgacgtatgttcccatagtaacgccaatagggactttccattgacgtcaatgggtg |
| | | | gagtatttacggtaaactgcccacttggcagtacatcaagtgtatcatatgccaagta |
| | | | cgccccctattgacgtcaatgacggtaaatggcccgcctggcattatgcccagtacat |
| | | | gaccttatgggactttcctacttggcagtacatctacgtattagtcatcgctattacc |
| | | | atgtcgaggccacgttctgcttcactctccccatctcccccccctccccacccccaat |
| | | | tttgtatttatttattttttaattattttgtgcagcgatgggggcggggggggggggc |
| | | | gcgcgccaggcggggcggggcggggcgaggggcggggcggggcgaggcggagaggtgc |
| | | | ggcggcagccaatcagagcggcgcgctccgaaagtttccttttatggcgaggcggcgg |
| | | | cggcggcggccctataaaaagcgaagcgcgcggcgggcgggagcaagcttcgtttagt |
| | | | gaaccgtcagatcgcctggagacgccatccacgctgttttgacctccatagaagacac |
| | | | cgggaccgatccagcctccgcggattcgaatcccggccgggaacggtgcattggaacg |
| | | | cggattccccgtgccaagagtgacgtaagtaccgcctatagagtctataggcccacaa |
| | | | aaaatgctttcttcttttaatatacttttttgtttatcttatttctaatactttccct |
| | | | aatctctttctttcagggcaataatgatacaatgtatcatgcctctttgcaccattct |
| | | | aaagaataacagtgataatttctgggttaaggcaatagcaatatttctgcatataaat |
| | | | atttctgcatataaattgtaactgatgtaagaggtttcatattgctaatagcagctac |
| | | | aatccagctaccattctgcttttattttatggttgggataaggctggattattctgag |
| | | | tccaagctaggcccttttgctaatcatgttcatacctcttatcttcctcccacagctc |
| | | | ctgggcaacgtgctggtctgtgtgctggcccatcactttggcaaagaattgggattcg |
| | | | aaccggtgccgccaccATGGACTGGACCTGGAGGTTCCTCTTTGTGGTGGCAGCAGCT |
| | | | ACAGGTGTCCAGTCCCAAgttcagctggtgCAGtctggTGCAGAAGTTAAGAAGccag |
| | | | ggGCAtcaGTAAAGGTGTCCtgCAAGgcttctggcTACTCTTTCACTGGGTATTTCat |
| | | | aAATtgggtgAGAGAGgccccCGGCCAGggcctggaatggATGGGCCATattTCCTCC |
| | | | TCTTATGCAACTTCTACAtatAACCAGAAGTTTCAGggcAGAGTCactTTCACTGTGg |
| | | | acacatccAGCTCTacagcctacATGGAGCTGTCAagcctgAGATCTgaggacactgc |
| | | | agtctattattgtGTGagaAGTggaAACTAtGAAGAGTATgctatggacTACtggggt |
| | | | caaggaaccctggtcacAgtctcctcAgcCtcTaccaagggcccatcTgtcttccccc |
| | | | tggcaccctcctccaagagcacctctgggggcacagcTgccctgggctgcctggtcaa |
| | | | ggactacttcccTgaacctgtgacAgtctcCtggaactcaggAgccctgaccagTggA |
| | | | gtgcacaccttcccTgctgtcctacagtcctcaggactctactccctcagcTCTgtgg |
| | | | tgacAgtgccctccagcagcttgggcacccagacctacatctgcaaTgtgaatcacaa |
| | | | gcccagcaacaccaaggtggacaagaGagttgagcccaaatcttgtgacaaaactcac |
| | | | acatgcccaccTtgcccagcacctgaactGGtggggggaccAtcagtcttcctcCtcc |
| | | | ccccaaaacccaaggacaccctcatgatctccAGAacccctgaggtcacatgTgtggt |
| | | | ggtggaTgtgagccaTgaagaccctgaggtcaagttcaactggtaTgtggaTggAgtg |
| | | | gaggtgcataatgccaagacaaagccCcCTgaggagcagtacaacagcacTCTcAGAg |
| | | | tggtcTCTgtcctcacAgtcctgcaccaggactggctgaatggcaaggagtacaagtg |
| | | | caaggtctccaacaaagccctcccagcccccatTgagaaaaccatctccaaagccaaa |
| | | | gggcagcccAGAgaaccacaggtgtacaccctgcccccatccAGAgaTgagCtgacca |
| | | | agaaccaggtcagcctgacctgcctggtcaaaggcttctatcccTCTgacatTgcTgt |
| | | | ggagtgggagagcaatgggcagccTgagaacaactacaagaccacAcctcTTgtgctg |
| | | | gactcTgaTggctccttcttcctctacagcaagctcacAgtggacaagagcaggtggc |
| | | | agcaggggaaTgtcttctcatgcTCTgtgatgcatgaggctctgcacaaccactacac |
| | | | CcagaagagcctctccctgtctccAggtaaaagaaagaggAGAgagggcagaggaagt |
| | | | cttctaacatgTggtgaTgtggaggagaatccTggccctATGGACATGAGGGTCCCTG |
| | | | CTCAGCTCCTGGGGCTCCTGCTGCTCTGGCTCTCAGGTGCCAGATGTgaggttcagct |
| | | | ggtggagtctggTggtggcctGgtgcagccagggggctcactcAGAttgtcctgtgca |
| | | | gcttctggcttcaacattaaagacacctatatacactgggtgAGAcaggccccTggAa |
| | | | agggcctggaatgggttgcaaggatttatcctacTaatggttatactagatatgcAga |
| | | | tagTgtcaagggcAGAttcactataagTgcagacacatccaaaaacacagcctacctg |
| | | | cagatgaacagcctgAGAgctgaggacactgcAgtctattattgttctagatggggag |
| | | | ggTGGggcttctatgctTTTgacCTGtggggtcaaggaaccctggtcacAgtctcctc |
| | | | TggtggtggtggatcTggaggaggaggaAGTggaggtggaggtTCTgatatccagatg |
| | | | acccagtccccAagctccctgtcTgcctctgtgggGgatagggtcaccatcacctgcA |
| | | | GAgccagtcaggatgtgaatactgctgtagcctggtatcaacagaaaccaggaaaagc |
| | | | tccCaaactactgatttactcTgcatccttcctcTACtctggagtcccttctAGAttc |
| | | | tctggatccagatctggCacTgaCttcactctgaccatcagTagtctgcagccTgaag |
| | | | acttTgcaacttattactgtcaAcaacattatactactcctcccacCttTggacaggg |
| | | | taccaaggtggagatcaaaGGCTCTgatatTGTACTGacccagtccccTGACtccctg |
| | | | GCTGTGtctCTGggGGAAaggGCAaccatcAACtgcAGGAGTagtcagACCCTTCTGT |
| | | | ACTCTAATAACCAGAAAAACTACCTGgcctggtatcaaAAAaaaccaggaCAGCCTcc |
| | | | TaaactactgattAGTTGGgcaTTCACTAGGAAGtctggagtccctGACAGGttctct |
| | | | ggatcTGGGtcTggAacAgatttcacActgaccatcagcagtctgcagGCTgaagaTG |
| | | | TTgcaGTCtaCtactgtcagcaaTACTCAAACTACcctTGGacTttTggacagggGac |
| | | | caaAgtggagatcaaaAGGactgtCgctgcaccatctgtcttcatcttcccAccatct |
| | | | gatgagcagttgaaatctggaactgcctctgttAAGtgcctgctgaataacttctatc |
| | | | ccagagaggccaaagtacagtggaaggtggataaTgccctccaaAGTggtaactccca |
| | | | ggagagtgtcacagagcaggacagcaaggacagcacctacagcctcagcagcaccctg |
| | | | acCctgagcaaagcagactaTgagaaacacaaagtctaTgcctgTgaagtcacccatc |
| | | | agggcctgagcAGCccAgtcacaaagagcttcaacaggggagagtgttagtagtaact |
| | | | cgaggacggggtgaactacgcctgaggatccgatctttttccctctgccaaaaattat |
| | | | ggggacatcatgaagccccttgagcatctgacttctggctaataaaggaaatttattt |
| | | | tcattgcaatagtgtgttggaattttttgtgtctctcactcggcctaggtagataagt |
| | | | agcatggcgggttaatcattaactacaaggaacccctagtgatggagttggccactcc |
| | | | ctctctgcgcgctcgctcgctcactgaggccgggcgaccaaaggtcgcccgacgcccg |
| | | | ggctttgcccgggcggcctcagtgagcgagcgagcgcgcag |
| HER-100 | 4739 | 6508 | ctgcgcgctcgctcgctcactgaggccgcccgggcaaagcccgggcgtcgggcgacct |
| | | | ttggtcgcccggcctcagtgagcgagcgagcgcgcagagagggagtggccaactccat |
| | | | cactaggggttccttgtagttaatgattaacccgccatgctacttatctaccagggta |
| | | | atggggatcctctagaactatagctagtcgacattgattattgactagttattaatag |
| | | | taatcaattacggggtcattagttcatagcccatatatggagttccgcgttacataac |
| | | | ttacggtaaatggcccgcctggctgaccgcccaacgacccccgcccattgacgtcaat |
| | | | aatgacgtatgttcccatagtaacgccaatagggactttccattgacgtcaatgggtg |
| | | | gagtatttacggtaaactgcccacttggcagtacatcaagtgtatcatatgccaagta |
| | | | cgccccctattgacgtcaatgacggtaaatggcccgcctggcattatgcccagtacat |
| | | | gaccttatgggactttcctacttggcagtacatctacgtattagtcatcgctattacc |
| | | | atgtcgaggccacgttctgcttcactctccccatctcccccccctccccacccccaat |
| | | | tttgtatttatttattttttaattattttgtgcagcgatgggggcggggggggggggc |
| | | | gcgcgccaggcggggcggggcggggcgaggggcggggcggggcgaggcggagaggtgc |
| | | | ggcggcagccaatcagagcggcgcgctccgaaagtttccttttatggcgaggcggcgg |
| | | | cggcggcggccctataaaaagcgaagcgcgcggcgggcgggagcaagcttcgtttagt |
| | | | gaaccgtcagatcgcctggagacgccatccacgctgttttgacctccatagaagacac |
| | | | cgggaccgatccagcctccgcggattcgaatcccggccgggaacggtgcattggaacg |
| | | | cggattccccgtgccaagagtgacgtaagtaccgcctatagagtctataggcccacaa |
| | | | aaaatgctttcttcttttaatatacttttttgtttatcttatttctaatactttccct |
| | | | aatctctttctttcagggcaataatgatacaatgtatcatgcctctttgcaccattct |
| | | | aaagaataacagtgataatttctgggttaaggcaatagcaatatttctgcatataaat |
| | | | atttctgcatataaattgtaactgatgtaagaggtttcatattgctaatagcagctac |
| | | | aatccagctaccattctgcttttattttatggttgggataaggctggattattctgag |
| | | | tccaagctaggcccttttgctaatcatgttcatacctcttatcttcctcccacagctc |
| | | | ctgggcaacgtgctggtctgtgtgctggcccatcactttggcaaagaattgggattcg |
| | | | aaccggtgccgccaccATGGACTGGACCTGGAGGTTCCTCTTTGTGGTGGCAGCAGCT |
| | | | ACAGGTGTCCAGTCCCAAgttcagctggtgCAGtctggTGCAGAAGTTAAGAAGccag |
| | | | ggGCAtcaGTAAAGGTGTCCtgCAAGgcttctggcTACTCTTTCACTGGGTATTTCat |
| | | | aAATtgggtgAGAGAGgccccCGGCCAGggcctggaatggATGGGCCATattTCCTCC |
| | | | TCTTATGCAACTTCTACAtatAACCAGAAGTTTCAGggcAGAGTCactTTCACTGTGg |
| | | | acacatccAGCTCTacagcctacATGGAGCTGTCAagcctgAGATCTgaggacactgc |
| | | | agtctattattgtGTGagaAGTggaAACTAtGAAGAGTATgctatggacTACtggggt |
| | | | caaggaaccctggtcacAgtctcctcAgcCtcTaccaagggcccatcTgtcttccccc |
| | | | tggcaccctcctccaagagcacctctgggggcacagcTgccctgggctgcctggtcaa |
| | | | ggactacttcccTgaacctgtgacAgtctcCtggaactcaggAgccctgaccagTggA |
| | | | gtgcacaccttcccTgctgtcctacagtcctcaggactctactccctcagcTCTgtgg |
| | | | tgacAgtgccctccagcagcttgggcacccagacctacatctgcaaTgtgaatcacaa |
| | | | gcccagcaacaccaaggtggacaagaGagttgagcccaaatcttgtgacaaaactcac |
| | | | acatgcccaccTtgcccagcacctgaactGGtggggggaccAtcagtcttcctcCtcc |
| | | | ccccaaaacccaaggacaccctcatgatctccAGAacccctgaggtcacatgTgtggt |
| | | | ggtggaTgtgagccaTgaagaccctgaggtcaagttcaactggtaTgtggaTggAgtg |
| | | | gaggtgcataatgccaagacaaagccCcCTgaggagcagtacaacagcacTCTcAGAg |
| | | | tggtcTCTgtcctcacAgtcctgcaccaggactggctgaatggcaaggagtacaagtg |
| | | | caaggtctccaacaaagccctcccagcccccatTgagaaaaccatctccaaagccaaa |
| | | | gggcagcccAGAgaaccacaggtgtacaccctgcccccatccAGAgaTgagCtgacca |
| | | | agaaccaggtcagcctgacctgcctggtcaaaggcttctatcccTCTgacatTgcTgt |
| | | | ggagtgggagagcaatgggcagccTgagaacaactacaagaccacAcctcTTgtgctg |
| | | | gactcTgaTggctccttcttcctctacagcaagctcacAgtggacaagagcaggtggc |
| | | | agcaggggaaTgtcttctcatgcTCTgtgatgcatgaggctctgcacaaccactacac |
| | | | CcagaagagcctctccctgtctccAggtaaaagaaagaggAGAgagggcagaggaagt |
| | | | cttctaacatgTggtgaTgtggaggagaatccTggccctATGGACATGAGGGTCCCTG |
| | | | CTCAGCTCCTGGGGCTCCTGCTGCTCTGGCTCTCAGGTGCCAGATGTgaggttcagct |
| | | | ggtggagtctggTggtggcctGgtgcagccagggggctcactcAGAttgtcctgtgca |
| | | | gcttctggcttcaacattaaagacacctatatacactgggtgAGAcaggccccTggAa |
| | | | agggcctggaatgggttgcaaggatttatcctacTaatggttatactagatatgcAga |
| | | | tagTgtcaagggcAGAttcactataagTgcagacacatccaaaaacacagcctacctg |
| | | | cagatgaacagcctgAGAgctgaggacactgcAgtctattattgttctagatggggag |
| | | | ggTGGggcttctatgctATGGCCCTGtggggtcaaggaaccctggtcacAgtctcctc |
| | | | TggtggtggtggatcTggaggaggaggaAGTggaggtggaggtTCTgatatccagatg |
| | | | acccagtccccAagctccctgtcTgcctctgtgggGgatagggtcaccatcacctgcA |
| | | | GAgccagtcaggatgtgaatactgctgtagcctggtatcaacagaaaccaggaaaagc |
| | | | tccCaaactactgatttactcTgcatccttcctcTACtctggagtcccttctAGAttc |
| | | | tctggatccagatctggCacTgaCttcactctgaccatcagTagtctgcagccTgaag |
| | | | acttTgcaacttattactgtcaAcaacattatactactcctcccacCttTggacaggg |
| | | | taccaaggtggagatcaaaGGCTCTgatatTGTACTGacccagtccccTGACtccctg |
| | | | GCTGTGtctCTGggGGAAaggGCAaccatcAACtgcAGGAGTagtcagACCCTTCTGT |
| | | | ACTCTAATAACCAGAAAAACTACCTGgcctggtatcaaAAAaaaccaggaCAGCCTcc |
| | | | TaaactactgattAGTTGGgcaTTCACTAGGAAGtctggagtccctGACAGGttctct |
| | | | ggatcTGGGtcTggAacAgatttcacActgaccatcagcagtctgcagGCTgaagaTG |
| | | | TTgcaGTCtaCtactgtcagcaaTACTCAAACTACcctTGGacTttTggacagggGac |
| | | | caaAgtggagatcaaaAGGactgtCgctgcaccatctgtcttcatcttcccAccatct |
| | | | gatgagcagttgaaatctggaactgcctctgttAAGtgcctgctgaataacttctatc |
| | | | ccagagaggccaaagtacagtggaaggtggataaTgccctccaaAGTggtaactccca |
| | | | ggagagtgtcacagagcaggacagcaaggacagcacctacagcctcagcagcaccctg |
| | | | acCctgagcaaagcagactaTgagaaacacaaagtctaTgcctgTgaagtcacccatc |
| | | | agggcctgagcAGCccAgtcacaaagagcttcaacaggggagagtgttagtagtaact |
| | | | cgaggacggggtgaactacgcctgaggatccgatctttttccctctgccaaaaattat |
| | | | ggggacatcatgaagccccttgagcatctgacttctggctaataaaggaaatttattt |
| | | | tcattgcaatagtgtgttggaattttttgtgtctctcactcggcctaggtagataagt |
| | | | agcatggcgggttaatcattaactacaaggaacccctagtgatggagttggccactcc |
| | | | ctctctgcgcgctcgctcgctcactgaggccgggcgaccaaaggtcgcccgacgcccg |
| | | | ggctttgcccgggcggcctcagtgagcgagcgagcgcgcag |
| HER-101 | 4739 | 6509 | ctgcgcgctcgctcgctcactgaggccgcccgggcaaagcccgggcgtcgggcgacct |
| | | | ttggtcgcccggcctcagtgagcgagcgagcgcgcagagagggagtggccaactccat |
| | | | cactaggggttccttgtagttaatgattaacccgccatgctacttatctaccagggta |
| | | | atggggatcctctagaactatagctagtcgacattgattattgactagttattaatag |
| | | | taatcaattacggggtcattagttcatagcccatatatggagttccgcgttacataac |
| | | | ttacggtaaatggcccgcctggctgaccgcccaacgacccccgcccattgacgtcaat |
| | | | aatgacgtatgttcccatagtaacgccaatagggactttccattgacgtcaatgggtg |
| | | | gagtatttacggtaaactgcccacttggcagtacatcaagtgtatcatatgccaagta |
| | | | cgccccctattgacgtcaatgacggtaaatggcccgcctggcattatgcccagtacat |
| | | | gaccttatgggactttcctacttggcagtacatctacgtattagtcatcgctattacc |
| | | | atgtcgaggccacgttctgcttcactctccccatctcccccccctccccacccccaat |
| | | | tttgtatttatttattttttaattattttgtgcagcgatgggggcggggggggggggc |
| | | | gcgcgccaggcggggcggggcggggcgaggggcggggcggggcgaggcggagaggtgc |
| | | | ggcggcagccaatcagagcggcgcgctccgaaagtttccttttatggcgaggcggcgg |
| | | | cggcggcggccctataaaaagcgaagcgcgcggcgggcgggagcaagcttcgtttagt |
| | | | gaaccgtcagatcgcctggagacgccatccacgctgttttgacctccatagaagacac |
| | | | cgggaccgatccagcctccgcggattcgaatcccggccgggaacggtgcattggaacg |
| | | | cggattccccgtgccaagagtgacgtaagtaccgcctatagagtctataggcccacaa |
| | | | aaaatgctttcttcttttaatatacttttttgtttatcttatttctaatactttccct |
| | | | aatctctttctttcagggcaataatgatacaatgtatcatgcctctttgcaccattct |
| | | | aaagaataacagtgataatttctgggttaaggcaatagcaatatttctgcatataaat |
| | | | atttctgcatataaattgtaactgatgtaagaggtttcatattgctaatagcagctac |
| | | | aatccagctaccattctgcttttattttatggttgggataaggctggattattctgag |
| | | | tccaagctaggcccttttgctaatcatgttcatacctcttatcttcctcccacagctc |
| | | | ctgggcaacgtgctggtctgtgtgctggcccatcactttggcaaagaattgggattcg |
| | | | aaccggtgccgccaccATGGACTGGACCTGGAGGTTCCTCTTTGTGGTGGCAGCAGCT |
| | | | ACAGGTGTCCAGTCCCAAgttcagctggtgCAGtctggTGCAGAAGTTAAGAAGccag |
| | | | ggGCAtcaGTAAAGGTGTCCtgCAAGgcttctggcTACTCTTTCACTGGGTATTTCat |
| | | | aAATtgggtgAGAGAGgccccCGGCCAGggcctggaatggATGGGCCATattTCCTCC |
| | | | TCTTATGCAACTTCTACAtatAACCAGAAGTTTCAGggcAGAGTCactTTCACTGTGg |
| | | | acacatccAGCTCTacagcctacATGGAGCTGTCAagcctgAGATCTgaggacactgc |
| | | | agtctattattgtGTGagaAGTggaAACTAtGAAGAGTATgctatggacTACtggggt |
| | | | caaggaaccctggtcacAgtctcctcAgcCtcTaccaagggcccatcTgtcttccccc |
| | | | tggcaccctcctccaagagcacctctgggggcacagcTgccctgggctgcctggtcaa |
| | | | ggactacttcccTgaacctgtgacAgtctcCtggaactcaggAgccctgaccagTggA |
| | | | gtgcacaccttcccTgctgtcctacagtcctcaggactctactccctcagcTCTgtgg |
| | | | tgacAgtgccctccagcagcttgggcacccagacctacatctgcaaTgtgaatcacaa |
| | | | gcccagcaacaccaaggtggacaagaGagttgagcccaaatcttgtgacaaaactcac |
| | | | acatgcccaccTtgcccagcacctgaactGGtggggggaccAtcagtcttcctcCtcc |
| | | | ccccaaaacccaaggacaccctcatgatctccAGAacccctgaggtcacatgTgtggt |
| | | | ggtggaTgtgagccaTgaagaccctgaggtcaagttcaactggtaTgtggaTggAgtg |
| | | | gaggtgcataatgccaagacaaagccCcCTgaggagcagtacaacagcacTCTcAGAg |
| | | | tggtcTCTgtcctcacAgtcctgcaccaggactggctgaatggcaaggagtacaagtg |
| | | | caaggtctccaacaaagccctcccagcccccatTgagaaaaccatctccaaagccaaa |
| | | | gggcagcccAGAgaaccacaggtgtacaccctgcccccatccAGAgaTgagCtgacca |
| | | | agaaccaggtcagcctgacctgcctggtcaaaggcttctatcccTCTgacatTgcTgt |
| | | | ggagtgggagagcaatgggcagccTgagaacaactacaagaccacAcctcTTgtgctg |
| | | | gactcTgaTggctccttcttcctctacagcaagctcacAgtggacaagagcaggtggc |
| | | | agcaggggaaTgtcttctcatgcTCTgtgatgcatgaggctctgcacaaccactacac |
| | | | CcagaagagcctctccctgtctccAggtaaaagaaagaggAGAgagggcagaggaagt |
| | | | cttctaacatgTggtgaTgtggaggagaatccTggccctATGGACATGAGGGTCCCTG |
| | | | CTCAGCTCCTGGGGCTCCTGCTGCTCTGGCTCTCAGGTGCCAGATGTgaggttcagct |
| | | | ggtggagtctggTggtggcctGgtgcagccagggggctcactcAGAttgtcctgtgca |
| | | | gcttctggcttcaacattaaagacacctatatacactgggtgAGAcaggccccTggAa |
| | | | agggcctggaatgggttgcaaggatttatcctacTaatggttatactagatatgcAga |
| | | | tagTgtcaagggcAGAttcactataagTgcagacacatccaaaaacacagcctacctg |
| | | | cagatgaacagcctgAGAgctgaggacactgcAgtctattattgttctagatggggag |
| | | | ggGATggcttctatgctTTTGCCCTGtggggtcaaggaaccctggtcacAgtctcctc |
| | | | TggtggtggtggatcTggaggaggaggaAGTggaggtggaggtTCTgatatccagatg |
| | | | acccagtccccAagctccctgtcTgcctctgtgggGgatagggtcaccatcacctgcA |
| | | | GAgccagtcaggatgtgaatactgctgtagcctggtatcaacagaaaccaggaaaagc |
| | | | tccCaaactactgatttactcTgcatccttcctcTACtctggagtcccttctAGAttc |
| | | | tctggatccagatctggCacTgaCttcactctgaccatcagTagtctgcagccTgaag |
| | | | acttTgcaacttattactgtcaAcaacattatactactcctcccacCttTggacaggg |
| | | | taccaaggtggagatcaaaGGCTCTgatatTGTACTGacccagtccccTGACtccctg |
| | | | GCTGTGtctCTGggGGAAaggGCAaccatcAACtgcAGGAGTagtcagACCCTTCTGT |
| | | | ACTCTAATAACCAGAAAAACTACCTGgcctggtatcaaAAAaaaccaggaCAGCCTcc |
| | | | TaaactactgattAGTTGGgcaTTCACTAGGAAGtctggagtccctGACAGGttctct |
| | | | ggatcTGGGtcTggAacAgatttcacActgaccatcagcagtctgcagGCTgaagaTG |
| | | | TTgcaGTCtaCtactgtcagcaaTACTCAAACTACcctTGGacTttTggacagggGac |
| | | | caaAgtggagatcaaaAGGactgtCgctgcaccatctgtcttcatcttcccAccatct |
| | | | gatgagcagttgaaatctggaactgcctctgttAAGtgcctgctgaataacttctatc |
| | | | ccagagaggccaaagtacagtggaaggtggataaTgccctccaaAGTggtaactccca |
| | | | ggagagtgtcacagagcaggacagcaaggacagcacctacagcctcagcagcaccctg |
| | | | acCctgagcaaagcagactaTgagaaacacaaagtctaTgcctgTgaagtcacccatc |
| | | | agggcctgagcAGCccAgtcacaaagagcttcaacaggggagagtgttagtagtaact |
| | | | cgaggacggggtgaactacgcctgaggatccgatctttttccctctgccaaaaattat |
| | | | ggggacatcatgaagccccttgagcatctgacttctggctaataaaggaaatttattt |
| | | | tcattgcaatagtgtgttggaattttttgtgtctctcactcggcctaggtagataagt |
| | | | agcatggcgggttaatcattaactacaaggaacccctagtgatggagttggccactcc |
| | | | ctctctgcgcgctcgctcgctcactgaggccgggcgaccaaaggtcgcccgacgcccg |
| | | | ggctttgcccgggcggcctcagtgagcgagcgagcgcgcag |
| HER-102 | 3989 | 6550 | ctgcgcgctcgctcgctcactgaggccgcccgggcaaagcccgggcgtcgggcgacct |
| | | | ttggtcgcccggcctcagtgagcgagcgagcgcgcagagagggagtggccaactccat |
| | | | cactaggggttccttgtagttaatgattaacccgccatgctacttatctaccagggta |
| | | | atggggatcctctagaactatagctagtcgacattgattattgactagttattaatag |
| | | | taatcaattacggggtcattagttcatagcccatatatggagttccgcgttacataac |
| | | | ttacggtaaatggcccgcctggctgaccgcccaacgacccccgcccattgacgtcaat |
| | | | aatgacgtatgttcccatagtaacgccaatagggactttccattgacgtcaatgggtg |
| | | | gagtatttacggtaaactgcccacttggcagtacatcaagtgtatcatatgccaagta |
| | | | cgccccctattgacgtcaatgacggtaaatggcccgcctggcattatgcccagtacat |
| | | | gaccttatgggactttcctacttggcagtacatctacgtattagtcatcgctattacc |
| | | | atgtcgaggccacgttctgcttcactctccccatctcccccccctccccacccccaat |
| | | | tttgtatttatttattttttaattattttgtgcagcgatgggggcggggggggggggc |
| | | | gcgcgccaggcggggcggggcggggcgaggggcggggcggggcgaggcggagaggtgc |
| | | | ggcggcagccaatcagagcggcgcgctccgaaagtttccttttatggcgaggcggcgg |
| | | | cggcggcggccctataaaaagcgaagcgcgcggcgggcgggagcaagcttcgtttagt |
| | | | gaaccgtcagatcgcctggagacgccatccacgctgttttgacctccatagaagacac |
| | | | cgggaccgatccagcctccgcggattcgaatcccggccgggaacggtgcattggaacg |
| | | | cggattccccgtgccaagagtgacgtaagtaccgcctatagagtctataggcccacaa |
| | | | aaaatgctttcttcttttaatatacttttttgtttatcttatttctaatactttccct |
| | | | aatctctttctttcagggcaataatgatacaatgtatcatgcctctttgcaccattct |
| | | | aaagaataacagtgataatttctgggttaaggcaatagcaatatttctgcatataaat |
| | | | atttctgcatataaattgtaactgatgtaagaggtttcatattgctaatagcagctac |
| | | | aatccagctaccattctgcttttattttatggttgggataaggctggattattctgag |
| | | | tccaagctaggcccttttgctaatcatgttcatacctcttatcttcctcccacagctc |
| | | | ctgggcaacgtgctggtctgtgtgctggcccatcactttggcaaagaattgggattcg |
| | | | aaccggtgccgccaccATGGACTGGACCTGGAGGTTCCTCTTTGTGGTGGCAGCAGCT |
| | | | ACAGGTGTCCAGTCTgaggttcagctggtggagtctggAggtggcctggtgcagccag |
| | | | ggggctcactcAGAttgtcctgtgcagcttctggcttcaacattaaagacacctatat |
| | | | acactgggtgagacaggccccAggtaagggcctggaatgggttgcaaggatttatcct |
| | | | acCaatggttatactagatatgcTgatTCTgtcaagggcAGAttcactataTCTgcag |
| | | | acacatccaaaaacacagcctacctgcagatgaacagcctgAGAgctgaggacactgc |
| | | | TgtctattattgttctagatggggaggggaTggcttctatgctatggacTACtggggt |
| | | | caaggaaccctggtcacAgtctcctcTgcCtcTaccaagggcccatcTgtcttccccc |
| | | | tggcaccctcctccaagagcacctctgggggcacagcTgccctgggctgcctggtcaa |
| | | | ggactacttcccTgaacctgtgacAgtctcCtggaactcaggAgccctgaccagTggA |
| | | | gtgcacaccttcccTgctgtcctacagtcctcaggactctactccctcagcTCTgtgg |
| | | | tgacAgtgccctccagcagcttgggcacccagacctacatctgcaaTgtgaatcacaa |
| | | | gcccagcaacaccaaggtggacaagaGagttgagcccaaatcttgtgacaaaactcac |
| | | | acatgcccaccTtgcccagcacctgaactGGtggggggaccAtcagtcttcctcCtcc |
| | | | ccccaaaacccaaggacaccctcatgatctccAGAacccctgaggtcacatgTgtggt |
| | | | ggtggaTgtgagccaTgaagaccctgaggtcaagttcaactggtaTgtggaTggAgtg |
| | | | gaggtgcataatgccaagacaaagccCcCTgaggagcagtacaacagcacTCTcAGAg |
| | | | tggtcTCTgtcctcacAgtcctgcaccaggactggctgaatggcaaggagtacaagtg |
| | | | caaggtctccaacaaagccctcccagcccccatTgagaaaaccatctccaaagccaaa |
| | | | gggcagcccAGAgaaccacaggtgtacaccctgcccccatccAGAgaTgagCtgacca |
| | | | agaaccaggtcagcctgacctgcctggtcaaaggcttctatcccTCTgacatTgcTgt |
| | | | ggagtgggagagcaatgggcagccTgagaacaactacaagaccacAcctcTTgtgctg |
| | | | gactcTgaTggctccttcttcctctacagcaagctcacAgtggacaagagcagAtggc |
| | | | agcaggggaaTgtcttctcatgcTCTgtgatgcatgaggctctgcacaaccactacac |
| | | | CcagaagagcctctccctgtctccAggtaaaagaaagaggAGAgagggcagaggaagt |
| | | | cttctaacatgTggtgaTgtggaggagaatccTggccctATGGACATGAGGGTCCCTG |
| | | | CTCAGCTCCTGGGGCTCCTGCTGCTCTGGCTCTCAGGTGCCAGATGTgatatccagat |
| | | | gacccagtccccTagctccctgtcTgcctctgtgggAgatagggtcaccatcacctgT |
| | | | AGAgccagtcaggatgtgaatactgctgtagcctggtatcaacagaaaccaggaaaag |
| | | | ctccTaaactactgatttactcTgcatccttcctcTACtctggagtcccttctAGGtt |
| | | | ctctggatccagatctgggacTgatttcactctgaccatcagcagtctgcagccAgaa |
| | | | gacttTgcaacttattactgtcagcaacattatactactcctcccacTttTggacagg |
| | | | gtaccaaggtggagatcaaaAGAactgtggctgcaccatctgtcttcatcttcccAcc |
| | | | atctgatgagcagttgaaatctggaactgcctctgttgtgtgcctgctgaataacttc |
| | | | tatcccagagaggccaaagtacagtggaaggtggataaTgccctccaatcAggtaact |
| | | | cccaggagagtgtcacagagcaggacagcaaggacagcacctacagcctcagcagcac |
| | | | cctgacTctgagcaaagcagactaTgagaaacacaaagtctaTgcctgTgaagtcacc |
| | | | catcagggcctgagctcTccTgtcacaaagagcttcaacaggggagagtgttagtagt |
| | | | aactcgaggacggggtgaactacgcctgaggatccgatctttttccctctgccaaaaa |
| | | | ttatggggacatcatgaagccccttgagcatctgacttctggctaataaaggaaattt |
| | | | attttcattgcaatagtgtgttggaattttttgtgtctctcactcggcctaggtagat |
| | | | aagtagcatggcgggttaatcattaactacaaggaacccctagtgatggagttggcca |
| | | | ctccctctctgcgcgctcgctcgctcactgaggccgggcgaccaaaggtcgcccgacg |
| | | | cccgggctttgcccgggcggcctcagtgagcgagcgagcgcgcag |
| HER-103 | 4047 | 7588 | ctgcgcgctcgctcgctcactgaggccgcccgggcaaagcccgggcgtcgggcgacct |
| | | | ttggtcgcccggcctcagtgagcgagcgagcgcgcagagagggagtggccaactccat |
| | | | cactaggggttccttgtagttaatgattaacccgccatgctacttatctaccagggta |
| | | | atggggatcctctagaactatagctagtcgacataacgcgtgatctaacatatcctgg |
| | | | tgtggagtagcggacgctgctatgacagaggctcgggggcctgagctggctctgtgag |
| | | | ctggggaggaggcagacagccaggccttgtctgcaagcagacctggcagcattgggct |
| | | | ggccgccccccagggcctcctcttcatgcccagtgaatgactcaccttggcacagaca |
| | | | caatgttcggggtgggcacagtgcctgcttcccgccgcaccccagcccccctcaaatg |
| | | | ccttccgagaagcccattgagcagggggcttgcattgcaccccagcctgacagcctgg |
| | | | catcttgggataaaagcagcacagccccctaggggctgcccttgctgtgtggcgccac |
| | | | cggcggtggagaacaaggctctattcagcctgtgcccaggaaaggggatcaggggatg |
| | | | cccaggcatggacagtgggtggcagggggggagaggagggctgtctgcttcccagaag |
| | | | tccaaggacacaaatgggtgaggggagagctctccccatagctgggctgcggcccaac |
| | | | cccaccccctcaggctatgccagggggtgttgccaggggcacccgggcatcgccagtc |
| | | | tagcccactccttcataaagccctcgcatcccaggagcgagcagagccagagcaggtt |
| | | | ggagaggagacgcatcacctccgctgctcgcggggatcctctagaagcttcgtttagt |
| | | | gaaccgtcagatcgcctggagacgccatccacgctgttttgacctccatagaagacac |
| | | | cgggaccgatccagcctccgcggattcgaatcccggccgggaacggtgcattggaacg |
| | | | cggattccccgtgccaagagtgacgtaagtaccgcctatagagtctataggcccacaa |
| | | | aaaatgctttcttcttttaatatacttttttgtttatcttatttctaatactttccct |
| | | | aatctctttctttcagggcaataatgatacaatgtatcatgcctctttgcaccattct |
| | | | aaagaataacagtgataatttctgggttaaggcaatagcaatatttctgcatataaat |
| | | | atttctgcatataaattgtaactgatgtaagaggtttcatattgctaatagcagctac |
| | | | aatccagctaccattctgcttttattttatggttgggataaggctggattattctgag |
| | | | tccaagctaggcccttttgctaatcatgttcatacctcttatcttcctcccacagctc |
| | | | ctgggcaacgtgctggtctgtgtgctggcccatcactttggcaaagaattgggattcg |
| | | | aaccggtgccgccaccATGGACTGGACCTGGAGGTTCCTCTTTGTGGTGGCAGCAGCT |
| | | | ACAGGTGTCCAGTCTgaggttcagctggtggagtctggAggtggcctggtgcagccag |
| | | | ggggctcactcAGAttgtcctgtgcagcttctggcttcaacattaaagacacctatat |
| | | | acactgggtgagacaggccccAggtaagggcctggaatgggttgcaaggatttatcct |
| | | | acCaatggttatactagatatgcTgatTCTgtcaagggcAGAttcactataTCTgcag |
| | | | acacatccaaaaacacagcctacctgcagatgaacagcctgAGAgctgaggacactgc |
| | | | TgtctattattgttctagatggggaggggaTggcttctatgctatggacTACtggggt |
| | | | caaggaaccctggtcacAgtctcctcTgcCtcTaccaagggcccatcTgtcttccccc |
| | | | tggcaccctcctccaagagcacctctgggggcacagcTgccctgggctgcctggtcaa |
| | | | ggactacttcccTgaacctgtgacAgtctcCtggaactcaggAgccctgaccagTggA |
| | | | gtgcacaccttcccTgctgtcctacagtcctcaggactctactccctcagcTCTgtgg |
| | | | tgacAgtgccctccagcagcttgggcacccagacctacatctgcaaTgtgaatcacaa |
| | | | gcccagcaacaccaaggtggacaagaGagttgagcccaaatcttgtgacaaaactcac |
| | | | acatgcccaccTtgcccagcacctgaactGGtggggggaccAtcagtcttcctcCtcc |
| | | | ccccaaaacccaaggacaccctcatgGCAtccAGAacccctgaggtcacatgTgtggt |
| | | | ggtggaTgtgagccaTgaagaccctgaggtcaagttcaactggtaTgtggaTggAgtg |
| | | | gaggtgcataatgccaagacaaagccCcCTgaggagcagtacaacagcacTCTcAGAg |
| | | | tggtcTCTgtcctcacAgtcctgGCCcaggactggctgaatggcaaggagtacaagtg |
| | | | caaggtctccaacaaagccctcccagcccccatTgagaaaaccatctccaaagccaaa |
| | | | gggcagcccAGAgaaccacaggtgtacaccctgcccccatccAGAgaTgagCtgacca |
| | | | agaaccaggtcagcctgacctgcctggtcaaaggcttctatcccTCTgacatTgcTgt |
| | | | ggagtgggagagcaatgggcagccTgagaacaactacaagaccacAcctcTTgtgctg |
| | | | gactcTgaTggctccttcttcctctacagcaagctcacAgtggacaagagcagAtggc |
| | | | agcaggggaaTgtcttctcatgcTCTgtgatgcatgaggctctgcacaacGCTtacac |
| | | | CcagaagagcctctccctgtctccAggtaaaagaaagaggAGAgagggcagaggaagt |
| | | | cttctaacatgTggtgaTgtggaggagaatccTggccctATGGACATGAGGGTCCCTG |
| | | | CTCAGCTCCTGGGGCTCCTGCTGCTCTGGCTCTCAGGTGCCAGATGTgatatccagat |
| | | | gacccagtccccTagctccctgtcTgcctctgtgggAgatagggtcaccatcacctgT |
| | | | AGAgccagtcaggatgtgaatactgctgtagcctggtatcaacagaaaccaggaaaag |
| | | | ctccTaaactactgatttactcTgcatccttcctcTACtctggagtcccttctAGGtt |
| | | | ctctggatccagatctgggacTgatttcactctgaccatcagcagtctgcagccAgaa |
| | | | gacttTgcaacttattactgtcagcaacattatactactcctcccacTttTggacagg |
| | | | gtaccaaggtggagatcaaaAGAactgtggctgcaccatctgtcttcatcttcccAcc |
| | | | atctgatgagcagttgaaatctggaactgcctctgttgtgtgcctgctgaataacttc |
| | | | tatcccagagaggccaaagtacagtggaaggtggataaTgccctccaatcAggtaact |
| | | | cccaggagagtgtcacagagcaggacagcaaggacagcacctacagcctcagcagcac |
| | | | cctgacTctgagcaaagcagactaTgagaaacacaaagtctaTgcctgTgaagtcacc |
| | | | catcagggcctgagctcTccTgtcacaaagagcttcaacaggggagagtgttagtagt |
| | | | aactcgaggacggggtgaactacgcctgaggatccgatctttttccctctgccaaaaa |
| | | | ttatggggacatcatgaagccccttgagcatctgacttctggctaataaaggaaattt |
| | | | attttcattgcaatagtgtgttggaattttttgtgtctctcactcggcctaggtagat |
| | | | aagtagcatggcgggttaatcattaactacaaggaacccctagtgatggagttggcca |
| | | | ctccctctctgcgcgctcgctcgctcactgaggccgggcgaccaaaggtcgcccgacg |
| | | | cccgggctttgcccgggcggcctcagtgagcgagcgagcgcgcag |

[1139] In some embodiments, the genetic element of an AAV particle described herein comprises a nucleotide sequence comprising the all of the components or a combination of the components as described in Tables 17-19, 23-26, 40, 42, 43, 68, and 69, or a sequence having at least 70%, 75%, 80%, 85%, 90%, 95%, or 99% sequence identity to the aforesaid sequences.

TABLE 68
Sequence Regions in ITR to ITR Sequences

| | HER-04 (SEQ ID NO: 5163) | | | HER-05 (SEQ ID NO: 5170) | | |
|---|---|---|---|---|---|---|
| Sequence | Region SEQ | Region | Position in SEQ ID | Region SEQ | Region | Position in SEQ |
| Regions | ID NO | length (nt) | NO: 5163 | ID NO | length (nt) | ID NO: 5170 |
| 5′ ITR | 6559 | 130 | 1-130 | 6559 | 130 | 1-130 |
| CB | 6566 | 260 | 590-849 | 6566 | 260 | 590-849 |
| promoter | | | | | | |
| Exon | 6573 | 134 | 877-1010 | 6573 | 134 | 877-1010 |
| Intron | 6578 | 32 | 1011-1042 | 6578 | 32 | 1011-1042 |
| Intron | 6580 | 347 | 1043-1389 | 6580 | 347 | 1043-1389 |
| Exon | 6576 | 53 | 1390-1442 | 6576 | 53 | 1390-1442 |
| Signal | 5157 | 57 | 1467-1523 | 5157 | 57 | 1467-1523 |
| VH | 5002 | 360 | 1524-1883 | 5171 | 357 | 1524-1880 |
| Constant | 5003 | 993 | 1884-2876 | 5011 | 990 | 1881-2870 |
| Linker | 1724 | 12 | 2877-2888 | 1724 | 12 | 2871-2882 |
| Linker | 1726 | 54 | 2889-2942 | 1726 | 54 | 2883-2936 |
| Signal | 5159 | 66 | 2943-3008 | 5159 | 66 | 2937-3002 |
| VL | 5005 | 321 | 3009-3329 | 5175 | 321 | 3003-3323 |
| Constant | 5007 | 321 | 3330-3650 | 5007 | 321 | 3324-3644 |
| PolyA | 6590 | 127 | 3693-3819 | 6590 | 127 | 3687-3813 |
| 3′ ITR | 6561 | 130 | 3863-3992 | 6561 | 130 | 3857-3986 |

[1140] In some embodiments, the AAV particle comprises a genetic element comprising the nucleotide sequence of SEQ ID NO: 5163 (HER-04), or a nucleotide sequence substantially identical (e.g., having at least 70%, 75%, 80%, 85%, 90%, 95%, 99% or 100%, sequence identity) thereto. In some embodiments, the genetic element comprises the nucleotide sequence of SEQ ID NO: 5163, or a sequence substantially identical (e.g., having at least 70%, 75%, 80%, 85%, 90%, 95%, or 99% sequence identity) thereto. In some embodiments, the genetic element comprising the nucleotide sequence of SEQ ID NO: 5163, comprises in 5′ to 3′ order: a 5′ inverted terminal repeat (ITR) sequence region comprising the nucleotide sequence of SEQ ID NO: 6559; a CB promoter comprising the nucleotide sequence of SEQ ID NO: 6566, further comprised an ie exon 1 region (SEQ ID NO: 6573), an ie intron 1 region (SEQ ID NO: 6578), a second human beta-globin intron region (SEQ ID NO: 6580), and a human beta-globin exon region (SEQ ID NO: 6576); a heavy chain signal sequence comprising the nucleotide sequence of SEQ ID NO: 5157, a heavy chain variable region comprising the nucleotide sequence of SEQ ID NO: 5002 and a heavy chain constant region comprising the nucleotide sequence of SEQ ID NO: 5003; a furin cleavage site comprising the nucleotide sequence of SEQ ID NO: 1724; a T2A linker comprising the nucleotide sequence of SEQ ID NO: 1726; a light chain signal sequence comprising the nucleotide sequence of SEQ ID NO: 5159, a light chain variable region comprising the nucleotide sequence of SEQ ID NO: 5005 and a light chain constant region comprising the nucleotide sequence of SEQ ID NO: 5007; a rabbit globin polyadenylation sequence comprising the nucleotide sequence of SEQ ID NO: 6590; and a 3′ ITR sequence region comprising the nucleotide sequence of SEQ ID NO: 6561; or a sequence substantially identical (e.g., having at least 70%, 75%, 80%, 85%, 90%, 95%, or 99% sequence identity) to any of the aforesaid sequences. In some embodiments, disclosed herein is an antibody molecule encoded by the genetic element comprising the nucleotide sequence of SEQ ID NO: 5163 or a sequence substantially identical (e.g., having at least 70%, 75%, 80%, 85%, 90%, 95%, or 99% sequence identity) thereto.

[1141] In some embodiments, the genetic element comprising the nucleotide sequence of SEQ ID NO: 5163, or a sequence substantially identical (e.g., having at least 70%, 75%, 80%, 85%, 90%, 95%, or 99% sequence identity) thereto, encodes an antibody molecule comprising a heavy chain variable region comprising a HC CDR1 amino acid sequence of SEQ ID NO: 5036, a HC CDR2 amino acid sequence of SEQ ID NO: 5037, and an HC CDR3 amino acid sequence of SEQ ID NO: 5038; and a light chain variable region comprising an LC CDR1 amino acid sequence of SEQ ID NO: 5043, an LC CDR2 amino acid sequence of SEQ ID NO: 5044, and an LC CDR3 amino acid sequence of SEQ ID NO: 5045. In some embodiments, the genetic element comprising the nucleotide sequence of SEQ ID NO: 5163 or a sequence substantially identical (e.g., having at least 70%, 75%, 80%, 85%, 90%, 95%, or 99% sequence identity) thereto, encodes an antibody molecule comprising a heavy chain variable region comprising a HC CDR1 amino acid sequence of SEQ ID NO: 5040, a HC CDR2 amino acid sequence of SEQ ID NO: 5041, and an HC CDR3 amino acid sequence of SEQ ID NO: 5042; and a light chain variable region comprising an LC CDR1 amino acid sequence of SEQ ID NO: 5046, an LC CDR2 amino acid sequence of SEQ ID NO: 5047, and an LC CDR3 amino acid sequence of SEQ ID NO: 5048.

[1142] In some embodiments, a genetic element comprising the sequence of SEQ ID NO: 5163, or a sequence substantially identical (e.g., having at least 70%, 75%, 80%, 85%, 90%, 95%, or 99% sequence identity) thereto, encodes an antibody molecule comprising a heavy chain variable region comprising the amino acid sequence of SEQ ID NO: 5002 and/or a light chain variable region comprising the amino acid sequence of SEQ ID NO: 5006; or a sequence substantially identical (e.g., having at least 70%, 75%, 80%, 85%, 90%, 95%, or 99% sequence identity) to the any of the aforesaid sequences.

[1143] In some embodiments, a genetic element comprising the sequence of SEQ ID NO: 5163, or a sequence substantially identical (e.g., having at least 70%, 75%, 80%, 85%, 90%, 95%, or 99% sequence identity) thereto, encodes an antibody molecule comprising a heavy chain comprising the amino acid sequence of SEQ ID NO: 5034 and/or a light chain comprising the amino acid sequence of SEQ ID NO: 5036, or a sequence substantially identical (e.g., having at least 70%, 75%, 80%, 85%, 90%, 95%, or 99% sequence identity) to the aforesaid sequences.

[1144] In some embodiments, the AAV particle comprises a genetic element comprising the nucleotide sequence of SEQ ID NO: 5170 (HER-05), or a nucleotide sequence substantially identical (e.g., having at least 70%, 75%, 80%, 85%, 90%, 95%, 99% or 100%, sequence identity) thereto. In some embodiments, the genetic element comprises the nucleotide sequence of SEQ ID NO: 5170, or a sequence substantially identical (e.g., having at least 70%, 75%, 80%, 85%, 90%, 95%, or 99% sequence identity) thereto. In some embodiments, the genetic element comprising the nucleotide sequence of SEQ ID NO: 5170, comprises in 5′ to 3′ order: a 5′ inverted terminal repeat (ITR) sequence region comprising the nucleotide sequence of SEQ ID NO: 6559; a CB promoter comprising the nucleotide sequence of SEQ ID NO: 6566, further comprised an ie exon 1 region (SEQ ID NO: 6573), an ie intron 1 region (SEQ ID NO: 6578), a second human beta-globin intron region (SEQ ID NO: 6580), and a human beta-globin exon region (SEQ ID NO: 6576); a heavy chain signal sequence comprising the nucleotide sequence of SEQ ID NO: 5157, a heavy chain variable region comprising the nucleotide sequence of SEQ ID NO: 5171 and a heavy chain constant region comprising the nucleotide sequence of SEQ ID NO: 5011; a furin cleavage site comprising the nucleotide sequence of SEQ ID NO: 1724; a T2A linker comprising the nucleotide sequence of SEQ ID NO: 1726; a light chain signal sequence comprising the nucleotide sequence of SEQ ID NO: 5159, a light chain variable region comprising the nucleotide sequence of SEQ ID NO: 5175 and a light chain constant region comprising the nucleotide sequence of SEQ ID NO: 5007; a rabbit globin polyadenylation sequence comprising the nucleotide sequence of SEQ ID NO: 6590; and a 3′ ITR sequence region comprising the nucleotide sequence of SEQ ID NO: 6561; or a sequence substantially identical (e.g., having at least 70%, 75%, 80%, 85%, 90%, 95%, or 99% sequence identity) to any of the aforesaid sequences. In some embodiments, disclosed herein is an antibody molecule encoded by the genetic element comprising the nucleotide sequence of SEQ ID NO: 5170 or a sequence substantially identical (e.g., having at least 70%, 75%, 80%, 85%, 90%, 95%, or 99% sequence identity) thereto.

[1145] In some embodiments, the genetic element comprising the nucleotide sequence of SEQ ID NO: 5170, or a sequence substantially identical (e.g., having at least 70%, 75%, 80%, 85%, 90%, 95%, or 99% sequence identity) thereto, encodes an antibody molecule comprising a heavy chain variable region comprising a HC CDR1 amino acid sequence of SEQ ID NO: 5179, a HC CDR2 amino acid sequence of SEQ ID NO: 5180, and an HC CDR3 amino acid sequence of SEQ ID NO: 5181; and a light chain variable region comprising an LC CDR1 amino acid sequence of SEQ ID NO: 5182, an LC CDR2 amino acid sequence of SEQ ID NO: 5183, and an LC CDR3 amino acid sequence of SEQ ID NO: 5184.

[1146] In some embodiments, a genetic element comprising the sequence of SEQ ID NO: 5170, or a sequence substantially identical (e.g., having at least 70%, 75%, 80%, 85%, 90%, 95%, or 99% sequence identity) thereto, encodes an antibody molecule comprising a heavy chain variable region comprising the amino acid sequence of SEQ ID NO: 5172 and/or a light chain variable region comprising the amino acid sequence of SEQ ID NO: 5176; or a sequence substantially identical (e.g., having at least 70%, 75%, 80%, 85%, 90%, 95%, or 99% sequence identity) to the any of the aforesaid sequences.

[1147] In some embodiments, a genetic element comprising the sequence of SEQ ID NO: 5170, or a sequence substantially identical (e.g., having at least 70%, 75%, 80%, 85%, 90%, 95%, or 99% sequence identity) thereto, encodes an antibody molecule comprising a heavy chain comprising the amino acid sequence of SEQ ID NO: 5174 and/or a light chain comprising the amino acid sequence of SEQ ID NO: 5187, or a sequence substantially identical (e.g., having at least 70%, 75%, 80%, 85%, 90%, 95%, or 99% sequence identity) to the aforesaid sequences.

TABLE 69
Sequence Regions in ITR to ITR Sequences

HER-15 (SEQ ID NO: 5165)

| Sequence | Region SEQ | Region | Position in SEQ |
|---|---|---|---|
| Regions | ID NO | length (nt) | ID NO: 5165 |
| 5′ ITR | 6559 | 130 | 1-130 |
| CMV(IE) | 6594 | 380 | 204-583 |
| CB promoter | 6566 | 260 | 590-849 |
| Intron | 6595 | 566 | 877-1442 |
| Signal (H5) | 5157 | 57 | 1467-1523 |
| VH | 5009 | 357 | 1524-1880 |
| Constant | 5011 | 990 | 1881-2870 |
| Linker | 1724 | 12 | 2871-2882 |
| Linker | 1726 | 54 | 2883-2936 |
| Signal | 5159 | 66 | 2937-3002 |
| C12 Fynomer | 5155 | 189 | 3003-3191 |
| Linker | 5347 | 45 | 3192-3236 |
| VL | 5013 | 321 | 3237-3557 |
| Constant | 5007 | 321 | 3558-3878 |
| PolyA | 6590 | 127 | 3921-4047 |
| 3′ ITR | 6561 | 130 | 4091-4220 |

[1148] In some embodiments, the AAV particle comprises a genetic element comprising the nucleotide sequence of SEQ ID NO: 5165 (HER-15), or a nucleotide sequence substantially identical (e.g., having at least 70%, 75%, 80%, 85%, 90%, 95%, 99% or 100%, sequence identity) thereto. In some embodiments, the genetic element comprises the nucleotide sequence of SEQ ID NO: 5165, or a nucleotide sequence substantially identical (e.g., having at least 70%, 75%, 80%, 85%, 90%, 95%, 99% or 100%, sequence identity) thereto. In some embodiments, the genetic element comprising the nucleotide sequence of SEQ ID NO: 5165, comprises in 5′ to 3′ order: a 5′ inverted terminal repeat (ITR) sequence region comprising the nucleotide sequence of SEQ ID NO: 6559; a CMV(IE) promoter region comprising the nucleotide sequence of SEQ ID NO: 6594 and a CB promoter comprising the nucleotide sequence of SEQ ID NO: 6566; an intron region comprising the nucleotide sequence of SEQ ID NO: 6595; a heavy chain signal sequence comprising the nucleotide sequence of SEQ ID NO: 5157, a heavy chain variable region comprising the nucleotide sequence of SEQ ID NO: 5009, and heavy chain constant region comprising the nucleotide sequence of SEQ ID NO: 5011; a furin cleavage site comprising the nucleotide sequence of SEQ ID NO: 1724; a T2A linker comprising the nucleotide sequence of SEQ ID NO: 1726; a light chain signal sequence comprising the nucleotide sequence of SEQ ID NO: 5159; a Fynomer comprising the nucleotide sequence of SEQ ID NO: 5155; a linker comprising the nucleotide sequence of SEQ ID NO: 5347; a light chain variable region comprising the nucleotide sequence of SEQ ID NO: 5013 and light chain constant region comprising the nucleotide sequence of SEQ ID NO: 5007; a rabbit globin polyadenylation sequence comprising the nucleotide sequence of SEQ ID NO: 6590; and a 3′ ITR sequence region comprising the nucleotide sequence of SEQ ID NO: 6561; or a nucleotide sequence substantially identical (e.g., having at least 70%, 75%, 80%, 85%, 90%, 95%, 99% or 100%, sequence identity) to any of the aforesaid sequences. In some embodiments, disclosed herein is an antibody molecule encoded by the genetic element comprising the nucleotide sequence of SEQ ID NO: 5165 or a sequence substantially identical (e.g., having at least 70%, 75%, 80%, 85%, 90%, 95%, or 99% sequence identity) thereto.

[1149] In some embodiments, the genetic element comprising the nucleotide sequence of SEQ ID NO: 5165, or a sequence substantially identical (e.g., having at least 70%, 75%, 80%, 85%, 90%, 95%, or 99% sequence identity) thereto, encodes a multispecific antibody molecule, e.g., bispecific or biparatopic, antibody molecule, comprising a first antigen binding domain that binds domain II of a HER2 antigen and a second antigen binding domain that binds domain I of a HER2 antigen. In some embodiments, the first antigen binding domain comprises a full antibody. In some embodiments, the second antigen binding domain comprises a C12 fynomer. In some embodiments, the first antigen binding domain comprises a heavy chain variable region comprising a HC CDR1 amino acid sequence of SEQ ID NO: 5149, a HC CDR2 amino acid sequence of SEQ ID NO: 5150, and an HC CDR3 amino acid sequence of SEQ ID NO: 5151; and a light chain variable region comprising an LC CDR1 amino acid sequence of SEQ ID NO: 5152, an LC CDR2 amino acid sequence of SEQ ID NO: 5153, and an LC CDR3 amino acid sequence of SEQ ID NO: 5154. In some embodiments, the second antigen binding domain comprises the amino acid sequence of SEQ ID NO: 5156, or an amino acid sequence substantially identical (e.g., having at least 70%, 75%, 80%, 85%, 90%, 95%, or 99% sequence identity) thereto.

[1150] In some embodiments, a genetic element comprising the sequence of SEQ ID NO: 5165, or a sequence substantially identical (e.g., having at least 70%, 75%, 80%, 85%, 90%, 95%, or 99% sequence identity) thereto, encodes a multispecific antibody molecule, comprising: a first chain, comprising from the N-terminus to the C-terminus, an anti-HER2 VH comprising the amino sequence comprising the amino acid sequence of SEQ ID NO: 5010, and a heavy chain constant region comprising the amino acid sequence of SEQ ID NO: 5012; and a second chain, comprising from the N-terminus to the C-terminus, a C12 fynomer comprising the amino acid sequence of SEQ ID NO: 5156, a (G4S)3 linker (SEQ ID NO: 4537), an anti-HER2 VL comprising the amino acid sequence of SEQ ID NO: 5014, and a light chain constant region (CL) comprising the amino acid sequence of SEQ ID NO: 5008; or a sequence substantially identical (e.g., having at least 70%, 75%, 80%, 85%, 90%, 95%, or 99% sequence identity) to the any of the aforesaid sequences.

[1151] In some embodiments, a genetic element comprising the sequence of SEQ ID NO: 5165, or a sequence substantially identical (e.g., having at least 70%, 75%, 80%, 85%, 90%, 95%, or 99% sequence identity) to the any of the aforesaid sequences, encodes a multispecific antibody molecule, comprising a first chain comprising the amino acid sequence of SEQ ID NO: 5066; and a second chain comprising the amino acid sequence of SEQ ID NO: 5156, a (G4S)3 linker (SEQ ID NO: 4537), and the amino acid sequence comprising of SEQ ID NO: 5068; or a sequence substantially identical (e.g., having at least 70%, 75%, 80%, 85%, 90%, 95%, or 99% sequence identity) to the any of the aforesaid sequences.

TABLE 17
Sequence Regions in ITR to ITR Sequences

| | HER-10 (SEQ ID NO: 5164) | | | HER-42 (SEQ ID NO: 5166) | | | HER-47 (SEQ ID NO: 5167) | | | HER-53 (SEQ ID NO: 5168) | | |
|---|---|---|---|---|---|---|---|---|---|---|---|---|
| | Region | Region | Position in | Region | Region | Position in | Region | Region | Position in | Region | Region | Position in |
| Sequence | SEQ ID | length | SEQ ID | SEQ ID | length | SEQ ID | SEQ ID | length | SEQ ID | SEQ ID | length | SEQ ID |
| Regions | NO | (nt) | NO: 5164 | NO | (nt) | NO: 5166 | NO | (nt) | NO: 5167 | NO | (nt) | NO: 5168 |
| 5′ ITR | 6559 | 130 | 1-130 | 6559 | 130 | 1-130 | 6559 | 130 | 1-130 | 6559 | 130 | 1-130 |
| CMV(IE) | 6594 | 380 | 204-583 | 6594 | 380 | 204-583 | 6594 | 380 | 204-583 | 6594 | 380 | 204-583 |
| CB | 6566 | 260 | 590-849 | 6566 | 260 | 590-849 | 6566 | 260 | 590-849 | 6566 | 260 | 590-849 |
| promoter | | | | | | | | | | | | |
| Intron | 6595 | 566 | 877-1442 | 6595 | 566 | 877-1442 | 6595 | 566 | 877-1442 | 6595 | 566 | 877-1442 |
| Signal | 5157 | 57 | 1467-1523 | 5157 | 57 | 1467-1523 | 5157 | 57 | 1467-1523 | 5157 | 57 | 1467-1523 |
| (H5) | | | | | | | | | | | | |
| VH | 5015 | 360 | 1524-1883 | 5070 | 360 | 1524-1883 | 5089 | 360 | 1524-1883 | 5109 | 360 | 1524-1883 |
| Constant | 5017 | 990 | 1884-2873 | 5025 | 993 | 1884-2876 | 5029 | 993 | 1884-2876 | 5017 | 990 | 1884-2873 |
| Linker | 1724 | 12 | 2874-2885 | 1724 | 12 | 2877-2888 | 1724 | 12 | 2877-2888 | 1724 | 12 | 2874-2885 |
| Linker | 1726 | 54 | 2886-2939 | 1726 | 54 | 2889-2942 | 1726 | 54 | 2889-2942 | 1726 | 54 | 2886-2939 |
| Signal | 5159 | 66 | 2940-3005 | 5159 | 66 | 2943-3008 | 5159 | 66 | 2943-3008 | 5159 | 66 | 2940-3005 |
| VL | 5019 | 321 | 3006-3326 | 5085 | 321 | 3009-3329 | 5093 | 321 | 3009-3329 | 5113 | 321 | 3006-3326 |
| Constant | 5021 | 322 | 3327-3648 | 5007 | 321 | 3330-3650 | 5007 | 321 | 3330-3650 | 5007 | 321 | 3327-3648 |
| PolyA | 6590 | 127 | 3690-3816 | 6590 | 127 | 3693-3819 | 6590 | 127 | 3693-3819 | 6590 | 127 | 3690-3816 |
| 3′ ITR | 6561 | 130 | 3860-3989 | 6561 | 130 | 3863-3992 | 6561 | 130 | 3863-3992 | 6561 | 130 | 3860-3989 |

[1152] In some embodiments, the AAV particle comprises a genetic element comprising the nucleotide sequence of SEQ ID NO: 5164 (HER-10), or a nucleotide sequence substantially identical (e.g., having at least 70%, 75%, 80%, 85%, 90%, 95%, 99% or 100%, sequence identity) thereto. In some embodiments, the genetic element comprises SEQ ID NO: 5164, or a nucleotide sequence substantially identical (e.g., having at least 70%, 75%, 80%, 85%, 90%, 95%, 99% or 100%, sequence identity) thereto. In some embodiments, the genetic element comprising the nucleotide sequence of SEQ ID NO: 5164, comprises in 5′ to 3′ order: a 5′ inverted terminal repeat (ITR) sequence region comprising the nucleotide sequence of SEQ ID NO: 6559; a CMV(IE) promoter comprising the nucleotide sequence of SEQ ID NO: 6594; a CB promoter comprising the nucleotide sequence of SEQ ID NO: 6566; a human beta-globin intron region comprising the nucleotide sequence of SEQ ID NO: 6595; a heavy chain signal sequence comprising the nucleotide sequence of SEQ ID NO: 5157, a heavy chain variable region comprising the nucleotide sequence of SEQ ID NO: 5015 and heavy chain constant region comprising the nucleotide sequence of SEQ ID NO: 5017; a furin cleavage site comprising the nucleotide sequence of SEQ ID NO: 1724; a T2A linker comprising the nucleotide sequence of SEQ ID NO: 1726; a light chain signal sequence comprising the nucleotide sequence of SEQ ID NO: 5159, a light chain variable region comprising the nucleotide sequence of SEQ ID NO: 5019 and light chain constant region comprising the nucleotide sequence of SEQ ID NO: 5021; a rabbit globin polyadenylation sequence comprising the nucleotide sequence of SEQ ID NO: 6590; and a 3′ ITR sequence region comprising the nucleotide sequence of SEQ ID NO: 6561; or a sequence substantially identical (e.g., having at least 70%, 75%, 80%, 85%, 90%, 95%, or 99% sequence identity) to any of the aforesaid sequences. In some embodiments, disclosed herein is an antibody molecule encoded by the genetic element comprising the nucleotide sequence of SEQ ID NO: 5164 or a sequence substantially identical (e.g., having at least 70%, 75%, 80%, 85%, 90%, 95%, or 99% sequence identity) thereto.

[1153] In some embodiments, a genetic element comprising the sequence of SEQ ID NO: 5164, or a sequence substantially identical (e.g., having at least 70%, 75%, 80%, 85%, 90%, 95%, or 99% sequence identity) thereto, encodes an antibody molecule comprising a heavy chain variable region comprising a HC CDR1 amino acid sequence of SEQ ID NO: 5053, a HC CDR2 amino acid sequence of SEQ ID NO: 5054, and an HC CDR3 amino acid sequence of SEQ ID NO: 5055; and a light chain variable region comprising an LC CDR1 amino acid sequence of SEQ ID NO: 5059, an LC CDR2 amino acid sequence of SEQ ID NO: 5060, and an LC CDR3 amino acid sequence of SEQ ID NO: 5061. In some embodiments, a genetic element comprising the sequence of SEQ ID NO: 5164, or a sequence substantially identical (e.g., having at least 70%, 75%, 80%, 85%, 90%, 95%, or 99% sequence identity) thereto, encodes an antibody molecule comprising a heavy chain variable region comprising a HC CDR1 amino acid sequence of SEQ ID NO: 5056, a HC CDR2 amino acid sequence of SEQ ID NO: 5057, and an HC CDR3 amino acid sequence of SEQ ID NO: 5058; and a light chain variable region comprising an LC CDR1 amino acid sequence of SEQ ID NO: 5062, an LC CDR2 amino acid sequence of SEQ ID NO: 5063, and an LC CDR3 amino acid sequence of SEQ ID NO: 5064.

[1154] In some embodiments, a genetic element comprising the sequence of SEQ ID NO: 5164, or a sequence substantially identical (e.g., having at least 70%, 75%, 80%, 85%, 90%, 95%, or 99% sequence identity) thereto, encodes an antibody molecule comprising a heavy chain variable region comprising the amino acid sequence of SEQ ID NO: 5016 and/or a light chain variable region comprising the amino acid sequence of SEQ ID NO: 5020, or a sequence substantially identical (e.g., having at least 70%, 75%, 80%, 85%, 90%, 95%, or 99% sequence identity) to the aforesaid sequences.

[1155] In some embodiments, a genetic element comprising the sequence of SEQ ID NO: 5164, or a sequence substantially identical (e.g., having at least 70%, 75%, 80%, 85%, 90%, 95%, or 99% sequence identity) thereto, encodes an antibody molecule comprising a heavy chain comprising the amino acid sequence of SEQ ID NO: 5050 and/or a light chain comprising the amino acid sequence of SEQ ID NO: 5052 or a sequence substantially identical (e.g., having at least 70%, 75%, 80%, 85%, 90%, 95%, or 99% sequence identity) to the any of the aforesaid.

[1156] In some embodiments, the AAV particle comprises a genetic element comprising the nucleotide sequence of SEQ ID NO: 5166 (HER-42), or a nucleotide sequence substantially identical (e.g., having at least 70%, 75%, 80%, 85%, 90%, 95%, 99% or 100%, sequence identity) thereto. In some embodiments, the genetic element comprises SEQ ID NO: 5166, or a nucleotide sequence substantially identical (e.g., having at least 70%, 75%, 80%, 85%, 90%, 95%, 99% or 100%, sequence identity) thereto. In some embodiments, the genetic element comprising the nucleotide sequence of SEQ ID NO: 5166, comprises in 5′ to 3′ order: a 5′ inverted terminal repeat (ITR) sequence region comprising the nucleotide sequence of SEQ ID NO: 6559; a CMV(IE) promoter comprising the nucleotide sequence of SEQ ID NO: 6594; a CB promoter comprising the nucleotide sequence of SEQ ID NO: 6566; a human beta-globin intron region comprising the nucleotide sequence of SEQ ID NO: 6595; a heavy chain signal sequence comprising the nucleotide sequence of SEQ ID NO: 5157, a heavy chain variable region comprising the nucleotide sequence of SEQ ID NO: 5070 and heavy chain constant region comprising the nucleotide sequence of SEQ ID NO: 5025; a furin cleavage site comprising the nucleotide sequence of SEQ ID NO: 1724; a T2A linker comprising the nucleotide sequence of SEQ ID NO: 1726; a light chain signal sequence comprising the nucleotide sequence of SEQ ID NO: 5159, a light chain variable region comprising the nucleotide sequence of SEQ ID NO: 5085 and light chain constant region comprising the nucleotide sequence of SEQ ID NO: 5007; a rabbit globin polyadenylation sequence comprising the nucleotide sequence of SEQ ID NO: 6590; and a 3′ ITR sequence region comprising the nucleotide sequence of SEQ ID NO: 6561; or a sequence substantially identical (e.g., having at least 70%, 75%, 80%, 85%, 90%, 95%, or 99% sequence identity) to any of the aforesaid sequences. In some embodiments, disclosed herein is an antibody molecule encoded by the genetic element comprising the nucleotide sequence of SEQ ID NO: 5166 or a sequence substantially identical (e.g., having at least 70%, 75%, 80%, 85%, 90%, 95%, or 99% sequence identity) thereto.

[1157] In some embodiments, a genetic element comprising the sequence of SEQ ID NO: 5166, or a sequence substantially identical (e.g., having at least 70%, 75%, 80%, 85%, 90%, 95%, or 99% sequence identity) thereto, encodes an antibody molecule comprising a heavy chain variable region comprising a HC CDR1 amino acid sequence of SEQ ID NO: 5071, a HC CDR2 amino acid sequence of SEQ ID NO: 5072, and an HC CDR3 amino acid sequence of SEQ ID NO: 5073; and a light chain variable region comprising an LC CDR1 amino acid sequence of SEQ ID NO: 5077, an LC CDR2 amino acid sequence of SEQ ID NO: 5078, and an LC CDR3 amino acid sequence of SEQ ID NO: 5079. In some embodiments, a genetic element comprising the sequence of SEQ ID NO: 5166, or a sequence substantially identical (e.g., having at least 70%, 75%, 80%, 85%, 90%, 95%, or 99% sequence identity) thereto, encodes an antibody molecule comprising a heavy chain variable region comprising a HC CDR1 amino acid sequence of SEQ ID NO: 5074, a HC CDR2 amino acid sequence of SEQ ID NO: 5075, and an HC CDR3 amino acid sequence of SEQ ID NO: 5076; and a light chain variable region comprising an LC CDR1 amino acid sequence of SEQ ID NO: 5080, an LC CDR2 amino acid sequence of SEQ ID NO: 5081, and an LC CDR3 amino acid sequence of SEQ ID NO: 5082.

[1158] In some embodiments, a genetic element comprising the sequence of SEQ ID NO: 5166, or a sequence substantially identical (e.g., having at least 70%, 75%, 80%, 85%, 90%, 95%, or 99% sequence identity) thereto, encodes an antibody molecule comprising a heavy chain variable region comprising the amino acid sequence of SEQ ID NO: 5069 and/or a light chain variable region comprising the amino acid sequence of SEQ ID NO: 5086, or a sequence substantially identical (e.g., having at least 70%, 75%, 80%, 85%, 90%, 95%, or 99% sequence identity) to the aforesaid sequences.

[1159] In some embodiments, a genetic element comprising the sequence of SEQ ID NO: 5166, or a sequence substantially identical (e.g., having at least 70%, 75%, 80%, 85%, 90%, 95%, or 99% sequence identity) thereto, encodes an antibody molecule comprising a heavy chain comprising the amino acid sequence of SEQ ID NO: 5084 and/or a light chain comprising the amino acid sequence of SEQ ID NO: 5088 or a sequence substantially identical (e.g., having at least 70%, 75%, 80%, 85%, 90%, 95%, or 99% sequence identity) to the any of the aforesaid.

[1160] In some embodiments, the AAV particle comprises a genetic element comprising the nucleotide sequence of SEQ ID NO: 5167 (HER-47), or a nucleotide sequence substantially identical (e.g., having at least 70%, 75%, 80%, 85%, 90%, 95%, 99% or 100%, sequence identity) thereto. In some embodiments, the genetic element comprises SEQ ID NO: 5167, or a nucleotide sequence substantially identical (e.g., having at least 70%, 75%, 80%, 85%, 90%, 95%, 99% or 100%, sequence identity) thereto. In some embodiments, the genetic element comprising the nucleotide sequence of SEQ ID NO: 5167, comprises in 5′ to 3′ order: a 5′ inverted terminal repeat (ITR) sequence region comprising the nucleotide sequence of SEQ ID NO: 6559; a CMV(IE) promoter comprising the nucleotide sequence of SEQ ID NO: 6594; a CB promoter comprising the nucleotide sequence of SEQ ID NO: 6566; a human beta-globin intron region comprising the nucleotide sequence of SEQ ID NO: 6595; a heavy chain signal sequence comprising the nucleotide sequence of SEQ ID NO: 5157, a heavy chain variable region comprising the nucleotide sequence of SEQ ID NO: 5089 and heavy chain constant region comprising the nucleotide sequence of SEQ ID NO: 5029; a furin cleavage site comprising the nucleotide sequence of SEQ ID NO: 1724; a T2A linker comprising the nucleotide sequence of SEQ ID NO: 1726; a light chain signal sequence comprising the nucleotide sequence of SEQ ID NO: 5159, a light chain variable region comprising the nucleotide sequence of SEQ ID NO: 5093 and light chain constant region comprising the nucleotide sequence of SEQ ID NO: 5007; a rabbit globin polyadenylation sequence comprising the nucleotide sequence of SEQ ID NO: 6590; and a 3′ ITR sequence region comprising the nucleotide sequence of SEQ ID NO: 6561; or a sequence substantially identical (e.g., having at least 70%, 75%, 80%, 85%, 90%, 95%, or 99% sequence identity) to any of the aforesaid sequences. In some embodiments, disclosed herein is an antibody molecule encoded by the genetic element comprising the nucleotide sequence of SEQ ID NO: 5167 or a sequence substantially identical (e.g., having at least 70%, 75%, 80%, 85%, 90%, 95%, or 99% sequence identity) thereto.

[1161] In some embodiments, a genetic element comprising the sequence of SEQ ID NO: 5167, or a sequence substantially identical (e.g., having at least 70%, 75%, 80%, 85%, 90%, 95%, or 99% sequence identity) thereto, encodes an antibody molecule comprising a heavy chain variable region comprising a HC CDR1 amino acid sequence of SEQ ID NO: 5097, a HC CDR2 amino acid sequence of SEQ ID NO: 5098, and an HC CDR3 amino acid sequence of SEQ ID NO: 5099; and a light chain variable region comprising an LC CDR1 amino acid sequence of SEQ ID NO: 5103, an LC CDR2 amino acid sequence of SEQ ID NO: 5104, and an LC CDR3 amino acid sequence of SEQ ID NO: 5105. In some embodiments, a genetic element comprising the sequence of SEQ ID NO: 5167, or a sequence substantially identical (e.g., having at least 70%, 75%, 80%, 85%, 90%, 95%, or 99% sequence identity) thereto, encodes an antibody molecule comprising a heavy chain variable region comprising a HC CDR1 amino acid sequence of SEQ ID NO: 5100, a HC CDR2 amino acid sequence of SEQ ID NO: 5101, and an HC CDR3 amino acid sequence of SEQ ID NO: 5102; and a light chain variable region comprising an LC CDR1 amino acid sequence of SEQ ID NO: 5106, an LC CDR2 amino acid sequence of SEQ ID NO: 5107, and an LC CDR3 amino acid sequence of SEQ ID NO: 5108.

[1162] In some embodiments, a genetic element comprising the sequence of SEQ ID NO: 5167, or a sequence substantially identical (e.g., having at least 70%, 75%, 80%, 85%, 90%, 95%, or 99% sequence identity) thereto, encodes an antibody molecule comprising a heavy chain variable region comprising the amino acid sequence of SEQ ID NO: 5090 and/or a light chain variable region comprising the amino acid sequence of SEQ ID NO: 5094, or a sequence substantially identical (e.g., having at least 70%, 75%, 80%, 85%, 90%, 95%, or 99% sequence identity) to the aforesaid sequences.

[1163] In some embodiments, a genetic element comprising the sequence of SEQ ID NO: 5167, or a sequence substantially identical (e.g., having at least 70%, 75%, 80%, 85%, 90%, 95%, or 99% sequence identity) thereto, encodes an antibody molecule comprising a heavy chain comprising the amino acid sequence of SEQ ID NO: 5092 and/or a light chain comprising the amino acid sequence of SEQ ID NO: 5096 or a sequence substantially identical (e.g., having at least 70%, 75%, 80%, 85%, 90%, 95%, or 99% sequence identity) to the any of the aforesaid.

[1164] In some embodiments, the AAV particle comprises a genetic element comprising the nucleotide sequence of SEQ ID NO: 5168 (HER-53), or a nucleotide sequence substantially identical (e.g., having at least 70%, 75%, 80%, 85%, 90%, 95%, 99% or 100%, sequence identity) thereto. In some embodiments, the genetic element comprises SEQ ID NO: 5168, or a nucleotide sequence substantially identical (e.g., having at least 70%, 75%, 80%, 85%, 90%, 95%, 99% or 100%, sequence identity) thereto. In some embodiments, the genetic element comprising the nucleotide sequence of SEQ ID NO: 5168, comprises in 5′ to 3′ order: a 5′ inverted terminal repeat (ITR) sequence region comprising the nucleotide sequence of SEQ ID NO: 6559; a CMV(IE) promoter comprising the nucleotide sequence of SEQ ID NO: 6594; a CB promoter comprising the nucleotide sequence of SEQ ID NO: 6566; a human beta-globin intron region comprising the nucleotide sequence of SEQ ID NO: 6595; a heavy chain signal sequence comprising the nucleotide sequence of SEQ ID NO: 5157, a heavy chain variable region comprising the nucleotide sequence of SEQ ID NO: 5109 and heavy chain constant region comprising the nucleotide sequence of SEQ ID NO: 5017; a furin cleavage site comprising the nucleotide sequence of SEQ ID NO: 1724; a T2A linker comprising the nucleotide sequence of SEQ ID NO: 1726; a light chain signal sequence comprising the nucleotide sequence of SEQ ID NO: 5159, a light chain variable region comprising the nucleotide sequence of SEQ ID NO: 5113 and light chain constant region comprising the nucleotide sequence of SEQ ID NO: 5007; a rabbit globin polyadenylation sequence comprising the nucleotide sequence of SEQ ID NO: 6590; and a 3′ ITR sequence region comprising the nucleotide sequence of SEQ ID NO: 6561; or a sequence substantially identical (e.g., having at least 70%, 75%, 80%, 85%, 90%, 95%, or 99% sequence identity) to any of the aforesaid sequences. In some embodiments, disclosed herein is an antibody molecule encoded by the genetic element comprising the nucleotide sequence of SEQ ID NO: 5168 or a sequence substantially identical (e.g., having at least 70%, 75%, 80%, 85%, 90%, 95%, or 99% sequence identity) thereto.

[1165] In some embodiments, a genetic element comprising the sequence of SEQ ID NO: 5168, or a sequence substantially identical (e.g., having at least 70%, 75%, 80%, 85%, 90%, 95%, or 99% sequence identity) thereto, encodes an antibody molecule comprising a heavy chain variable region comprising a HC CDR1 amino acid sequence of SEQ ID NO: 5117, a HC CDR2 amino acid sequence of SEQ ID NO: 5118, and an HC CDR3 amino acid sequence of SEQ ID NO: 5119; and a light chain variable region comprising an LC CDR1 amino acid sequence of SEQ ID NO: 5123, an LC CDR2 amino acid sequence of SEQ ID NO: 5124, and an LC CDR3 amino acid sequence of SEQ ID NO: 5125. In some embodiments, a genetic element comprising the sequence of SEQ ID NO: 5168, or a sequence substantially identical (e.g., having at least 70%, 75%, 80%, 85%, 90%, 95%, or 99% sequence identity) thereto, encodes an antibody molecule comprising a heavy chain variable region comprising a HC CDR1 amino acid sequence of SEQ ID NO: 5120, a HC CDR2 amino acid sequence of SEQ ID NO: 5121, and an HC CDR3 amino acid sequence of SEQ ID NO: 5122; and a light chain variable region comprising an LC CDR1 amino acid sequence of SEQ ID NO: 5126, an LC CDR2 amino acid sequence of SEQ ID NO: 5127, and an LC CDR3 amino acid sequence of SEQ ID NO: 5128.

[1166] In some embodiments, a genetic element comprising the sequence of SEQ ID NO: 5168, or a sequence substantially identical (e.g., having at least 70%, 75%, 80%, 85%, 90%, 95%, or 99% sequence identity) thereto, encodes an antibody molecule comprising a heavy chain variable region comprising the amino acid sequence of SEQ ID NO: 5110 and/or a light chain variable region comprising the amino acid sequence of SEQ ID NO: 5114, or a sequence substantially identical (e.g., having at least 70%, 75%, 80%, 85%, 90%, 95%, or 99% sequence identity) to the aforesaid sequences.

[1167] In some embodiments, a genetic element comprising the sequence of SEQ ID NO: 5168, or a sequence substantially identical (e.g., having at least 70%, 75%, 80%, 85%, 90%, 95%, or 99% sequence identity) thereto, encodes an antibody molecule comprising a heavy chain comprising the amino acid sequence of SEQ ID NO: 5112 and/or a light chain comprising the amino acid sequence of SEQ ID NO: 5116 or a sequence substantially identical (e.g., having at least 70%, 75%, 80%, 85%, 90%, 95%, or 99% sequence identity) to the any of the aforesaid.

TABLE 18
Sequence Regions in ITR to ITR Sequences

| | HER-43 (SEQ ID NO: 5185) | | | HER-46 (SEQ ID NO: 5186) | | |
|---|---|---|---|---|---|---|
| | | Region | | | Region | |
| Sequence | Region | length | Position in SEQ | Region SEQ | length | Position in SEQ |
| Regions | SEQ ID NO | (nt) | ID NO: 5185 | ID NO | (nt) | ID NO: 5186 |
| 5′ ITR | 6559 | 130 | 1-130 | 6559 | 130 | 1-130 |
| CB | 6566 | 260 | 590-849 | 6566 | 260 | 590-849 |
| promoter | | | | | | |
| Exon | 6573 | 134 | 877-1010 | 6573 | 134 | 877-1010 |
| Intron | 6578 | 32 | 1011-1042 | 6578 | 32 | 1011-1042 |
| Intron | 6580 | 347 | 1043-1389 | 6580 | 347 | 1043-1389 |
| Exon | 6576 | 53 | 1390-1442 | 6576 | 53 | 1390-1442 |
| Signal | 5157 | 57 | 1467-1523 | 5157 | 57 | 1467-1523 |
| VH | 5191 | 360 | 1524-1883 | 5223 | 360 | 1524-1883 |
| Constant | 5211 | 993 | 1884-2876 | 5213 | 993 | 1884-2876 |
| Linker | 1724 | 12 | 2877-2888 | 1724 | 12 | 2877-2888 |
| Linker | 1726 | 54 | 2889-2942 | 1726 | 54 | 2889-2942 |
| Signal | 5159 | 66 | 2943-3008 | 5159 | 66 | 2943-3008 |
| VL | 5195 | 321 | 3009-3329 | 5227 | 321 | 3009-3329 |
| Constant | 5007 | 321 | 3330-3650 | 5007 | 321 | 3330-3650 |
| PolyA | 6590 | 127 | 3693-3819 | 6590 | 127 | 3693-3819 |
| 3′ ITR | 6561 | 130 | 3863-3992 | 6561 | 130 | 3863-3992 |

[1168] In some embodiments, the AAV particle comprises a genetic element comprising the nucleotide sequence of SEQ ID NO: 5185 (HER-43), or a nucleotide sequence substantially identical (e.g., having at least 70%, 75%, 80%, 85%, 90%, 95%, 99% or 100%, sequence identity) thereto. In some embodiments, the genetic element comprises the nucleotide sequence of SEQ ID NO: 5185, or a nucleotide sequence substantially identical (e.g., having at least 70%, 75%, 80%, 85%, 90%, 95%, 99% or 100%, sequence identity) thereto. In some embodiments, the genetic element comprising the nucleotide sequence of SEQ ID NO: 5185, comprises in 5′ to 3′ order: a 5′ inverted terminal repeat (ITR) sequence region comprising the nucleotide sequence of SEQ ID NO: 6559; a CB promoter comprising the nucleotide sequence of SEQ ID NO: 6566; an ie1 exon 1 region comprising the nucleotide sequence of SEQ ID NO: 6573; a human beta-globin intron region comprising the nucleotide sequence of SEQ ID NO: 6578; a second human beta-globin intron region comprising the nucleotide sequence of SEQ ID NO: 6580; a human beta-globin exon region comprising the nucleotide sequence of SEQ ID NO: 6576; a heavy chain signal sequence comprising the nucleotide sequence of SEQ ID NO: 5157, a heavy chain variable region comprising the nucleotide sequence of SEQ ID NO: 5191, and heavy chain constant region comprising the nucleotide sequence of SEQ ID NO: 5211; a furin cleavage site comprising the nucleotide sequence of SEQ ID NO: 1724; a T2A linker comprising the nucleotide sequence of SEQ ID NO: 1726; a light chain signal sequence comprising the nucleotide sequence of SEQ ID NO: 5159, a light chain variable region comprising the nucleotide sequence of SEQ ID NO: 5195 and light chain constant region comprising the nucleotide sequence of SEQ ID NO: 5007; a rabbit globin polyadenylation sequence comprising the nucleotide sequence of SEQ ID NO: 6590; and a 3′ ITR sequence region comprising the nucleotide sequence of SEQ ID NO: 6561; or a nucleotide sequence substantially identical (e.g., having at least 70%, 75%, 80%, 85%, 90%, 95%, 99% or 100%, sequence identity) to any of the aforesaid sequences. In some embodiments, disclosed herein is an antibody molecule encoded by the genetic element comprising the nucleotide sequence of SEQ ID NO: 5185 or a sequence substantially identical (e.g., having at least 70%, 75%, 80%, 85%, 90%, 95%, or 99% sequence identity) thereto.

[1169] In some embodiments, a genetic element comprising the sequence of SEQ ID NO: 5185, or a sequence substantially identical (e.g., having at least 70%, 75%, 80%, 85%, 90%, 95%, or 99% sequence identity) thereto, encodes an antibody molecule comprising a heavy chain variable region comprising a HC CDR1 amino acid sequence of SEQ ID NO: 5199, a HC CDR2 amino acid sequence of SEQ ID NO: 5200, and an HC CDR3 amino acid sequence of SEQ ID NO: 5201; and a light chain variable region comprising an LC CDR1 amino acid sequence of SEQ ID NO: 5205, an LC CDR2 amino acid sequence of SEQ ID NO: 5206, and an LC CDR3 amino acid sequence of SEQ ID NO: 5207. In some embodiments, a genetic element comprising the sequence of SEQ ID NO: 5185, or a sequence substantially identical (e.g., having at least 70%, 75%, 80%, 85%, 90%, 95%, or 99% sequence identity) thereto, encodes an antibody molecule comprising a heavy chain variable region comprising a HC CDR1 amino acid sequence of SEQ ID NO: 5202, a HC CDR2 amino acid sequence of SEQ ID NO: 5203, and an HC CDR3 amino acid sequence of SEQ ID NO: 5204; and a light chain variable region comprising an LC CDR1 amino acid sequence of SEQ ID NO: 5208, an LC CDR2 amino acid sequence of SEQ ID NO: 5209, and an LC CDR3 amino acid sequence of SEQ ID NO: 5210.

[1170] In some embodiments, a genetic element comprising the sequence of SEQ ID NO: 5185, or a sequence substantially identical (e.g., having at least 70%, 75%, 80%, 85%, 90%, 95%, or 99% sequence identity) thereto, encodes an antibody molecule comprising a heavy chain variable region comprising the amino acid sequence of SEQ ID NO: 5192 and/or a light chain variable region comprising the amino acid sequence of SEQ ID NO: 5196; or a sequence substantially identical (e.g., having at least 70%, 75%, 80%, 85%, 90%, 95%, or 99% sequence identity) to the any of the aforesaid sequences.

[1171] In some embodiments, a genetic element comprising the sequence of SEQ ID NO: 5185, or a sequence substantially identical (e.g., having at least 70%, 75%, 80%, 85%, 90%, 95%, or 99% sequence identity) to the any of the aforesaid sequences, encodes an antibody molecule comprising a heavy chain comprising the amino acid sequence of SEQ ID NO: 5194 and/or a light chain comprising the amino acid sequence of SEQ ID NO: 5198; or a sequence substantially identical (e.g., having at least 70%, 75%, 80%, 85%, 90%, 95%, or 99% sequence identity) to the any of the aforesaid sequences.

[1172] In some embodiments, the AAV particle comprises a genetic element comprising the nucleotide sequence of SEQ ID NO: 5186 (HER-46), or a nucleotide sequence substantially identical (e.g., having at least 70%, 75%, 80%, 85%, 90%, 95%, 99% or 100%, sequence identity) thereto. In some embodiments, the genetic element comprises the nucleotide sequence of SEQ ID NO: 5186, or a nucleotide sequence substantially identical (e.g., having at least 70%, 75%, 80%, 85%, 90%, 95%, 99% or 100%, sequence identity) thereto. In some embodiments, the genetic element comprising the nucleotide sequence of SEQ ID NO: 5186, comprises in 5′ to 3′ order: a 5′ inverted terminal repeat (ITR) sequence region comprising the nucleotide sequence of SEQ ID NO: 6559; a CB promoter comprising the nucleotide sequence of SEQ ID NO: 6566; an ie1 exon 1 region comprising the nucleotide sequence of SEQ ID NO: 6573; a human beta-globin intron region comprising the nucleotide sequence of SEQ ID NO: 6578; a second human beta-globin intron region comprising the nucleotide sequence of SEQ ID NO: 6580; a human beta-globin exon region comprising the nucleotide sequence of SEQ ID NO: 6576; a heavy chain signal sequence comprising the nucleotide sequence of SEQ ID NO: 5157, a heavy chain variable region comprising the nucleotide sequence of SEQ ID NO: 5223, and heavy chain constant region comprising the nucleotide sequence of SEQ ID NO: 5213; a furin cleavage site comprising the nucleotide sequence of SEQ ID NO: 1724; a T2A linker comprising the nucleotide sequence of SEQ ID NO: 1726; a light chain signal sequence comprising the nucleotide sequence of SEQ ID NO: 5159, a light chain variable region comprising the nucleotide sequence of SEQ ID NO: 5227 and light chain constant region comprising the nucleotide sequence of SEQ ID NO: 5007; a rabbit globin polyadenylation sequence comprising the nucleotide sequence of SEQ ID NO: 6590; and a 3′ ITR sequence region comprising the nucleotide sequence of SEQ ID NO: 6561; or a nucleotide sequence substantially identical (e.g., having at least 70%, 75%, 80%, 85%, 90%, 95%, 99% or 100%, sequence identity) to any of the aforesaid sequences. In some embodiments, disclosed herein is an antibody molecule encoded by the genetic element comprising the nucleotide sequence of SEQ ID NO: 5186 or a sequence substantially identical (e.g., having at least 70%, 75%, 80%, 85%, 90%, 95%, or 99% sequence identity) thereto.

[1173] In some embodiments, a genetic element comprising the sequence of SEQ ID NO: 5186, or a sequence substantially identical (e.g., having at least 70%, 75%, 80%, 85%, 90%, 95%, or 99% sequence identity) thereto, encodes an antibody molecule comprising a heavy chain variable region comprising a HC CDR1 amino acid sequence of SEQ ID NO: 5231, a HC CDR2 amino acid sequence of SEQ ID NO: 5232, and an HC CDR3 amino acid sequence of SEQ ID NO: 5233; and a light chain variable region comprising an LC CDR1 amino acid sequence of SEQ ID NO: 5237, an LC CDR2 amino acid sequence of SEQ ID NO: 5238, and an LC CDR3 amino acid sequence of SEQ ID NO: 5239. In some embodiments, a genetic element comprising the sequence of SEQ ID NO: 5186, or a sequence substantially identical (e.g., having at least 70%, 75%, 80%, 85%, 90%, 95%, or 99% sequence identity) thereto, encodes an antibody molecule comprising a heavy chain variable region comprising a HC CDR1 amino acid sequence of SEQ ID NO: 5234, a HC CDR2 amino acid sequence of SEQ ID NO: 5235, and an HC CDR3 amino acid sequence of SEQ ID NO: 5236; and a light chain variable region comprising an LC CDR1 amino acid sequence of SEQ ID NO: 5240, an LC CDR2 amino acid sequence of SEQ ID NO: 5241, and an LC CDR3 amino acid sequence of SEQ ID NO: 5242.

[1174] In some embodiments, a genetic element comprising the sequence of SEQ ID NO: 5186, or a sequence substantially identical (e.g., having at least 70%, 75%, 80%, 85%, 90%, 95%, or 99% sequence identity) thereto, encodes an antibody molecule comprising a heavy chain variable region comprising the amino acid sequence of SEQ ID NO: 5224 and/or a light chain variable region comprising the amino acid sequence of SEQ ID NO: 5228; or a sequence substantially identical (e.g., having at least 70%, 75%, 80%, 85%, 90%, 95%, or 99% sequence identity) to the any of the aforesaid sequences.

[1175] In some embodiments, a genetic element comprising the sequence of SEQ ID NO: 5186, or a sequence substantially identical (e.g., having at least 70%, 75%, 80%, 85%, 90%, 95%, or 99% sequence identity) to the any of the aforesaid sequences, encodes an antibody molecule comprising a heavy chain comprising the amino acid sequence of SEQ ID NO: 5226 and/or a light chain comprising the amino acid sequence of SEQ ID NO: 5230; or a sequence substantially identical (e.g., having at least 70%, 75%, 80%, 85%, 90%, 95%, or 99% sequence identity) to the any of the aforesaid sequences.

TABLE 19
Sequence Regions in ITR to ITR Sequences

HER-57 (SEQ ID NO: 5187)

| Sequence | Region SEQ | Region | Position in |
|---|---|---|---|
| Regions | ID NO | length (nt) | SEQ ID NO: 5187 |
| 5′ ITR | 6559 | 130 | 1-130 |
| CMV(IE) | 6594 | 380 | 204-583 |
| CB promoter | 6566 | 260 | 590-849 |
| Exon | 6573 | 134 | 877-1010 |
| Intron | 6578 | 32 | 1011-1042 |
| Intron | 6580 | 347 | 1043-1389 |
| Exon | 6576 | 53 | 1390-1442 |
| Signal (H5) | 5157 | 57 | 1467-1523 |
| VH | 5253 | 360 | 1524-1883 |
| Linker | 5347 | 45 | 1884-1928 |
| VL | 5255 | 321 | 1929-2249 |
| Constant | 5277 | 696 | 2250-2945 |
| PolyA | 6590 | 127 | 2988-3114 |
| 3′ ITR | 6561 | 130 | 3158-3287 |

[1176] In some embodiments, the AAV particle comprises a genetic element comprising the nucleotide sequence of SEQ ID NO: 5187 (HER-57), or a nucleotide sequence substantially identical (e.g., having at least 70%, 75%, 80%, 85%, 90%, 95%, 99% or 100%, sequence identity) thereto. In some embodiments, the genetic element comprises the nucleotide sequence of SEQ ID NO: 5187, or a sequence substantially identical (e.g., having at least 70%, 75%, 80%, 85%, 90%, 95%, or 99% sequence identity) thereto. In some embodiments, the genetic element comprising the nucleotide sequence of SEQ ID NO: 5187 comprises in 5′ to 3′ order: 5′ inverted terminal repeat (ITR) sequence region comprising the nucleotide sequence of SEQ ID NO: 6559; a CMV(IE) promoter comprising the nucleotide sequence of SEQ ID NO: 6594 and a CB promoter comprising the nucleotide sequence of SEQ ID NO: 6566; an ie1 exon 1 region comprising the nucleotide sequence of SEQ ID NO: 6573; a human beta-globin intron region comprising the nucleotide sequence of SEQ ID NO: 6578; a second human beta-globin intron region comprising the nucleotide sequence of SEQ ID NO: 6580; a human beta-globin exon region comprising the nucleotide sequence of SEQ ID NO: 6576; a heavy chain signal sequence comprising the nucleotide sequence of SEQ ID NO: 5157, a heavy chain variable region comprising the nucleotide sequence of SEQ ID NO: 5253, a linker region comprising the nucleotide sequence of SEQ ID NO: 5347; a light chain variable region comprising the nucleotide sequence of SEQ ID NO: 5255, and light chain constant region comprising the nucleotide sequence of SEQ ID NO:5277; a rabbit globin polyadenylation sequence comprising the nucleotide sequence of SEQ ID NO: 6590; and a 3′ ITR sequence region comprising the nucleotide sequence of SEQ ID NO: 6561; or a nucleotide sequence substantially identical (e.g., having at least 70%, 75%, 80%, 85%, 90%, 95%, 99% or 100%, sequence identity) to any of the aforesaid sequences. In some embodiments, disclosed herein is an antibody molecule encoded by the genetic element comprising the nucleotide sequence of SEQ ID NO: 5187 or a sequence substantially identical (e.g., having at least 70%, 75%, 80%, 85%, 90%, 95%, or 99% sequence identity) thereto.

[1177] In some embodiments, a genetic element comprising the sequence of SEQ ID NO: 5187, or a sequence substantially identical (e.g., having at least 70%, 75%, 80%, 85%, 90%, 95%, or 99% sequence identity) thereto, encodes an antibody molecule comprising a heavy chain variable region comprising a HC CDR1 amino acid sequence of SEQ ID NO: 5293, a HC CDR2 amino acid sequence of SEQ ID NO: 5294, and an HC CDR3 amino acid sequence of SEQ ID NO: 5295; and a light chain variable region comprising an LC CDR1 amino acid sequence of SEQ ID NO: 5299, an LC CDR2 amino acid sequence of SEQ ID NO: 5300, and an LC CDR3 amino acid sequence of SEQ ID NO: 5301. In some embodiments, a genetic element comprising the sequence of SEQ ID NO: 5187, or a sequence substantially identical (e.g., having at least 70%, 75%, 80%, 85%, 90%, 95%, or 99% sequence identity) thereto, encodes an antibody molecule comprising a heavy chain variable region comprising a HC CDR1 amino acid sequence of SEQ ID NO: 5296, a HC CDR2 amino acid sequence of SEQ ID NO: 5297, and an HC CDR3 amino acid sequence of SEQ ID NO: 5298; and a light chain variable region comprising an LC CDR1 amino acid sequence of SEQ ID NO: 5302, an LC CDR2 amino acid sequence of SEQ ID NO: 5303, and an LC CDR3 amino acid sequence of SEQ ID NO: 5304.

[1178] In some embodiments, a genetic element comprising the sequence of SEQ ID NO: 5187, or a sequence substantially identical (e.g., having at least 70%, 75%, 80%, 85%, 90%, 95%, or 99% sequence identity) thereto, encodes an antibody molecule comprising a heavy chain variable region comprising the amino acid sequence of SEQ ID NO: 5254 and/or a light chain variable region comprising the amino acid sequence of SEQ ID NO: 5256; or a sequence substantially identical (e.g., having at least 70%, 75%, 80%, 85%, 90%, 95%, or 99% sequence identity) to the any of the aforesaid sequences.

[1179] In some embodiments, a genetic element comprising the sequence of SEQ ID NO: 5187, or a sequence substantially identical (e.g., having at least 70%, 75%, 80%, 85%, 90%, 95%, or 99% sequence identity) thereto, encodes an antibody molecule comprising an scFv comprising the amino acid sequence of SEQ ID NO: 5351 and/or an Fc region comprising the amino acid sequence of SEQ ID NO: 5278; or a sequence substantially identical (e.g., having at least 70%, 75%, 80%, 85%, 90%, 95%, or 99% sequence identity) to the any of the aforesaid sequences.

TABLE 23
Sequence Regions in ITR to ITR Sequences

HER-69 (SEQ ID NO: 5169)

| Sequence | Region SEQ | Region | Position in |
|---|---|---|---|
| Regions | ID NO | length (nt) | SEQ ID NO: 5169 |
| 5′ ITR | 6559 | 130 | 1-130 |
| GFAP | 6568 | 699 | 216-914 |
| Promoter | | | |
| Intron | 6595 | 566 | 935-1500 |
| Signal (H5) | 5157 | 57 | 1525-1581 |
| VH | 5129 | 360 | 1582-1941 |
| Constant | 5017 | 990 | 1942-2931 |
| Linker | 1724 | 12 | 2932-2943 |
| Linker | 1726 | 54 | 2944-2997 |
| Signal | 5159 | 66 | 2998-3063 |
| VL | 5133 | 321 | 3064-3384 |
| Constant | 5021 | 322 | 3385-3706 |
| PolyA | 6590 | 127 | 3748-3874 |
| 3′ ITR | 6561 | 130 | 3918-4047 |

[1180] In some embodiments, the AAV particle comprises a genetic element comprising SEQ ID NO: 5169 (HER-69), or a nucleotide sequence substantially identical (e.g., having at least 70%, 75%, 80%, 85%, 90%, 95%, 99% or 100%, sequence identity) thereto. In some embodiments, the genetic element comprises SEQ ID NO: 5169, or a nucleotide sequence substantially identical (e.g., having at least 70%, 75%, 80%, 85%, 90%, 95%, 99% or 100%, sequence identity) thereto. In some embodiments, the genetic element comprising the nucleotide sequence of SEQ ID NO: 5169, comprises in 5′ to 3′ order: a 5′ inverted terminal repeat (ITR) sequence region comprising the nucleotide sequence of SEQ ID NO: 6559; a GFAP promoter comprising the nucleotide sequence of SEQ ID NO: 6568; a human beta-globin intron region comprising the nucleotide sequence comprising the nucleotide sequence of SEQ ID NO: 6595; a heavy chain signal sequence comprising the nucleotide sequence of SEQ ID NO: 5157, a heavy chain variable region comprising the nucleotide sequence of SEQ ID NO: 5129, and heavy chain constant region comprising the nucleotide sequence of SEQ ID NO: 5017; a furin cleavage site comprising the nucleotide sequence of SEQ ID NO: 1724; a T2A linker comprising the nucleotide sequence of SEQ ID NO: 1726; a light chain signal sequence comprising the nucleotide sequence of SEQ ID NO: 5159, a light chain variable region comprising the nucleotide sequence of SEQ ID NO: 5133 and light chain constant region comprising the nucleotide sequence of SEQ ID NO: 5021; a rabbit globin polyadenylation sequence comprising the nucleotide sequence of SEQ ID NO: 6590; and a 3′ ITR sequence region comprising the nucleotide sequence of SEQ ID NO: 6561; or a sequence substantially identical (e.g., having at least 70%, 75%, 80%, 85%, 90%, 95%, or 99% sequence identity) to any of the aforesaid sequences. In some embodiments, disclosed herein is an antibody molecule encoded by the genetic element comprising the nucleotide sequence of SEQ ID NO: 5169 or a sequence substantially identical (e.g., having at least 70%, 75%, 80%, 85%, 90%, 95%, or 99% sequence identity) thereto.

[1181] In some embodiments, a genetic element comprising the sequence of SEQ ID NO: 5169, or a sequence substantially identical (e.g., having at least 70%, 75%, 80%, 85%, 90%, 95%, or 99% sequence identity) thereto, encodes an antibody molecule comprising a heavy chain variable region comprising a HC CDR1 amino acid sequence of SEQ ID NO: 5137, a HC CDR2 amino acid sequence of SEQ ID NO: 5138, and an HC CDR3 amino acid sequence of SEQ ID NO: 5139; and a light chain variable region comprising an LC CDR1 amino acid sequence of SEQ ID NO: 5143, an LC CDR2 amino acid sequence of SEQ ID NO: 5144, and an LC CDR3 amino acid sequence of SEQ ID NO: 5145. In some embodiments, a genetic element comprising the sequence of SEQ ID NO: 5169, or a sequence substantially identical (e.g., having at least 70%, 75%, 80%, 85%, 90%, 95%, or 99% sequence identity) thereto, encodes an antibody molecule comprising a heavy chain variable region comprising a HC CDR1 amino acid sequence of SEQ ID NO: 5140, a HC CDR2 amino acid sequence of SEQ ID NO: 5141, and an HC CDR3 amino acid sequence of SEQ ID NO: 5142; and a light chain variable region comprising an LC CDR1 amino acid sequence of SEQ ID NO: 5146, an LC CDR2 amino acid sequence of SEQ ID NO: 5147, and an LC CDR3 amino acid sequence of SEQ ID NO: 5148.

[1182] In some embodiments, a genetic element comprising the sequence of SEQ ID NO: 5169, or a sequence substantially identical (e.g., having at least 70%, 75%, 80%, 85%, 90%, 95%, or 99% sequence identity) thereto, encodes an antibody molecule comprising a heavy chain variable region comprising the amino acid sequence of SEQ ID NO: 5130 and/or a light chain variable region comprising the amino acid sequence of SEQ ID NO: 5134; or a sequence substantially identical (e.g., having at least 70%, 75%, 80%, 85%, 90%, 95%, or 99% sequence identity) to the any of the aforesaid sequences.

[1183] In some embodiments, a genetic element comprising the sequence of SEQ ID NO: 5169, or a sequence substantially identical (e.g., having at least 70%, 75%, 80%, 85%, 90%, 95%, or 99% sequence identity) thereto, encodes an antibody molecule comprising a heavy chain comprising the amino acid sequence of SEQ ID NO: 5132 and/or a light chain comprising the amino acid sequence of SEQ ID NO: 5136, or a sequence substantially identical (e.g., having at least 70%, 75%, 80%, 85%, 90%, 95%, or 99% sequence identity) to the any of the aforesaid sequences.

TABLE 24
Sequence Regions in ITR to ITR Sequences

HER-62 (SEQ ID NO: 5188)

| Sequence | Region | Region | Position in |
|---|---|---|---|
| Regions | SEQ ID NO | length (nt) | SEQ ID NO: 5188 |
| 5′ITR | 6559 | 130 | 1-130 |
| CB promoter | 6566 | 260 | 590-849 |
| Exon | 6573 | 134 | 877-1010 |
| Intron | 6578 | 32 | 1011-1042 |
| Intron | 6580 | 347 | 1043-1389 |
| Exon | 6576 | 53 | 1390-1442 |
| Signal (H5) | 5157 | 57 | 1467-1523 |
| VH | 5257 | 357 | 1524-1880 |
| Linker | 5347 | 15 | 1881-1925 |
| VL | 5259 | 321 | 1926-2246 |
| Constant | 5279 | 696 | 2247-2942 |
| PolyA | 6590 | 127 | 2985-3111 |
| 3′ ITR | 6561 | 130 | 3155-3284 |

[1184] In some embodiments, the AAV particle comprises a genetic element comprising the nucleotide sequence of SEQ ID NO: 5188 (HER-62), or a nucleotide sequence substantially identical (e.g., having at least 70%, 75%, 80%, 85%, 90%, 95%, 99% or 100%, sequence identity) thereto. In some embodiments, the genetic element comprises the nucleotide sequence of SEQ ID NO: 5188, or a nucleotide sequence substantially identical (e.g., having at least 70%, 75%, 80%, 85%, 90%, 95%, 99% or 100%, sequence identity) thereto. In some embodiments, the genetic element comprising the nucleotide sequence of SEQ ID NO: 5188, comprises in 5′ to 3′ order: a 5′ inverted terminal repeat (ITR) sequence region comprising the nucleotide sequence of SEQ ID NO: 6559; a CB promoter comprising the nucleotide sequence of SEQ ID NO: 6566; an ie1 exon 1 region comprising the nucleotide sequence of SEQ ID NO: 6573; a human beta-globin intron region comprising the nucleotide sequence of SEQ ID NO: 6578; a second human beta-globin intron region comprising the nucleotide sequence of SEQ ID NO: 6580; a human beta-globin exon region comprising the nucleotide sequence of SEQ ID NO: 6576; a heavy chain signal sequence comprising the nucleotide sequence of SEQ ID NO: 5157, a heavy chain variable region comprising the nucleotide sequence of SEQ ID NO: 5257, a linker region comprising the nucleotide sequence of SEQ ID NO: 5347; a light chain variable region comprising the nucleotide sequence of SEQ ID NO: 5259, and light chain constant region comprising the nucleotide sequence of SEQ ID NO: 5279; a rabbit globin polyadenylation sequence comprising the nucleotide sequence of SEQ ID NO: 6590; and a 3′ ITR sequence region comprising the nucleotide sequence of SEQ ID NO: 6561; or a nucleotide sequence substantially identical (e.g., having at least 70%, 75%, 80%, 85%, 90%, 95%, 99% or 100%, sequence identity) to any of the aforesaid sequences. In some embodiments, disclosed herein is an antibody molecule encoded by the genetic element comprising the nucleotide sequence of SEQ ID NO: 5188 or a sequence substantially identical (e.g., having at least 70%, 75%, 80%, 85%, 90%, 95%, or 99% sequence identity) thereto.

[1185] In some embodiments, a genetic element comprising the sequence of SEQ ID NO: 5188, or a sequence substantially identical (e.g., having at least 70%, 75%, 80%, 85%, 90%, 95%, or 99% sequence identity) thereto, encodes an antibody molecule comprising a heavy chain variable region comprising a HC CDR1 amino acid sequence of SEQ ID NO: 5305, a HC CDR2 amino acid sequence of SEQ ID NO: 5306, and an HC CDR3 amino acid sequence of SEQ ID NO: 5307; and a light chain variable region comprising an LC CDR1 amino acid sequence of SEQ ID NO: 5308, an LC CDR2 amino acid sequence of SEQ ID NO: 5309, and an LC CDR3 amino acid sequence of SEQ ID NO: 5310.

[1186] In some embodiments, a genetic element comprising the sequence of SEQ ID NO: 5188, or a sequence substantially identical (e.g., having at least 70%, 75%, 80%, 85%, 90%, 95%, or 99% sequence identity) thereto, encodes an antibody molecule comprising a heavy chain variable region comprising the amino acid sequence of SEQ ID NO: 5258 and/or a light chain variable region comprising the amino acid sequence of SEQ ID NO: 5260; or a sequence substantially identical (e.g., having at least 70%, 75%, 80%, 85%, 90%, 95%, or 99% sequence identity) to the any of the aforesaid sequences.

[1187] In some embodiments, a genetic element comprising the sequence of SEQ ID NO: 5188, or a sequence substantially identical (e.g., having at least 70%, 75%, 80%, 85%, 90%, 95%, or 99% sequence identity) thereto, encodes an antibody molecule comprising an scFv comprising the amino acid sequence of SEQ ID NO: 5349 and/or an Fc region comprising the amino acid sequence of SEQ ID NO: 5278; or a sequence substantially identical (e.g., having at least 70%, 75%, 80%, 85%, 90%, 95%, or 99% sequence identity) to the any of the aforesaid sequences.

TABLE 25
Sequence Regions in ITR to ITR Sequences

| | HER-73 (SEQ ID NO: 5189) | | |
|---|---|---|---|
| | Region | Region length | Position in |
| Sequence Regions | SEQ ID NO | (nt) | SEQ ID NO: 5189 |
| 5′ ITR | 6559 | 130 | 1-130 |
| CB promoter | 6566 | 260 | 590-849 |
| Exon | 6573 | 134 | 877-1010 |
| Intron | 6578 | 32 | 1011-1042 |
| Intron | 6580 | 347 | 1043-1389 |
| Exon | 6576 | 53 | 1390-1442 |
| Signal | 5157 | 57 | 1467-1523 |
| VH | 5261 | 360 | 1524-1883 |
| Constant | 5215 | 993 | 1884-2876 |
| Linker | 6557 | 12 | 2877-2888 |
| Linker | 6558 | 54 | 2889-2942 |
| Signal | 5159 | 66 | 2943-3008 |
| VH | 6552 | 360 | 3009-3368 |
| Linker | 5347 | 45 | 3369-3413 |
| VL | 5265 | 321 | 3414-3734 |
| Linker | GGCTCT | 6 | 3735-3740 |
| VL | 5353 | 339 | 3741-4079 |
| Constant | 5217 | 321 | 4080-4400 |
| PolyA | 6590 | 127 | 4443-4569 |
| 3′ ITR | 6561 | 130 | 4613-4742 |

[1188] In some embodiments, the AAV particle comprises a genetic element comprising the nucleotide sequence of SEQ ID NO: 5189 (HER-73), or a nucleotide sequence substantially identical (e.g., having at least 70%, 75%, 80%, 85%, 90%, 95%, 99% or 100%, sequence identity) thereto. In some embodiments, the genetic element comprises the nucleotide sequence of SEQ ID NO: 5189, or a nucleotide sequence substantially identical (e.g., having at least 70%, 75%, 80%, 85%, 90%, 95%, 99% or 100%, sequence identity) thereto. In some embodiments, the genetic element comprising the nucleotide sequence of SEQ ID NO: 5189, comprises in 5′ to 3′ order: a 5′ inverted terminal repeat (ITR) sequence region comprising the nucleotide sequence of SEQ ID NO: 6559; a CB promoter comprising the nucleotide sequence of SEQ ID NO: 6566; an ie1 exon 1 region comprising the nucleotide sequence of SEQ ID NO: 6573; a human beta-globin intron region comprising the nucleotide sequence of SEQ ID NO: 6578; a second human beta-globin intron region comprising the nucleotide sequence of SEQ ID NO: 6580; a human beta-globin exon region comprising the nucleotide sequence of SEQ ID NO: 6576; a heavy chain signal sequence comprising the nucleotide sequence of SEQ ID NO: 5157, a heavy chain variable region comprising the nucleotide sequence of SEQ ID NO: 5261, a heavy chain constant region comprising the nucleotide sequence of SEQ ID NO: 5215; a furin cleavage site comprising the nucleotide sequence of SEQ ID NO: 6557; a T2A linker comprising the nucleotide sequence of SEQ ID NO: 6558; a light chain signal sequence comprising the nucleotide sequence of SEQ ID NO: 5159; a heavy chain variable region comprising the nucleotide sequence of SEQ ID NO: 6552, a linker region comprising the nucleotide sequence of SEQ ID NO: 5347, and a light chain variable region comprising the nucleotide sequence of SEQ ID NO: 5265; a linker comprising the nucleotide sequence of GGCTCT; a light chain variable region comprising the nucleotide sequence of SEQ ID NO: 5353, and a light chain constant region comprising the nucleotide sequence of SEQ ID NO: 5217; a rabbit globin polyadenylation sequence comprising the nucleotide sequence of SEQ ID NO: 6590; and a 3′ ITR sequence region comprising the nucleotide sequence of SEQ ID NO: 6561; or a nucleotide sequence substantially identical (e.g., having at least 70%, 75%, 80%, 85%, 90%, 95%, 99% or 100%, sequence identity) to any of the aforesaid sequences. In some embodiments, disclosed herein is an antibody molecule encoded by the genetic element comprising the nucleotide sequence of SEQ ID NO: 5189 or a sequence substantially identical (e.g., having at least 70%, 75%, 80%, 85%, 90%, 95%, or 99% sequence identity) thereto.

[1189] In some embodiments, a genetic element comprising the sequence of SEQ ID NO: 5189, or a sequence substantially identical (e.g., having at least 70%, 75%, 80%, 85%, 90%, 95%, or 99% sequence identity) thereto, encodes a multispecific, e.g., bispecific or biparatopic, antibody molecule, comprising a first antigen binding domain that binds domain I of a HER2 antigen and a second antigen binding domain that binds domain IV of a HER2 antigen. In some embodiments, the first antigen binding domain comprises a full antibody, e.g., an IgG antibody. In some embodiments, the second antigen binding domain comprises an scFv. In some embodiments, the first antigen binding domain comprises a heavy chain variable region comprising a HC CDR1 amino acid sequence of SEQ ID NO: 5358, a HC CDR2 amino acid sequence of SEQ ID NO: 5359, and an HC CDR3 amino acid sequence of SEQ ID NO: 5360; and a light chain variable region comprising an LC CDR1 amino acid sequence of SEQ ID NO: 5355, an LC CDR2 amino acid sequence of SEQ ID NO: 5356, and an LC CDR3 amino acid sequence of SEQ ID NO: 5357. In some embodiments, the second antigen binding domain comprises a HC CDR1 amino acid sequence of SEQ ID NO: 5361, a HC CDR2 amino acid sequence of SEQ ID NO: 5362, and an HC CDR3 amino acid sequence of SEQ ID NO: 5363; and a light chain variable region comprising an LC CDR1 amino acid sequence of SEQ ID NO: 5317, an LC CDR2 amino acid sequence of SEQ ID NO: 5318, and an LC CDR3 amino acid sequence of SEQ ID NO: 5319.

[1190] In some embodiments, a genetic element comprising the sequence of SEQ ID NO: 5189, or a sequence substantially identical (e.g., having at least 70%, 75%, 80%, 85%, 90%, 95%, or 99% sequence identity) thereto, encodes a multispecific antibody molecule comprising a first chain, which comprises, from the N-terminus to the C-terminus, a first anti-HER2 VH comprising the amino acid sequence of SEQ ID NO: 5262, and a heavy chain constant region comprising the amino acid sequence of SEQ ID NO: 5216; and a second chain, which comprises from the N-terminus to the C-terminus, a second anti-HER2 VH comprising the amino sequence of 5290, a (G4S)3 linker (SEQ ID NO: 4537), a first anti-HER2 VL comprising the amino acid sequence of SEQ ID NO: 5266, a (GS) linker, a second anti-HER2 VL comprising the amino acid sequence of SEQ ID NO: 5354, and a light chain constant region (CL) comprising the amino acid sequence of SEQ ID NO: 5218; or a sequence substantially identical (e.g., having at least 70%, 75%, 80%, 85%, 90%, 95%, or 99% sequence identity) to the any of the aforesaid sequences.

[1191] In some embodiments, a genetic element comprising the sequence of SEQ ID NO: 5189, or a sequence substantially identical (e.g., having at least 70%, 75%, 80%, 85%, 90%, 95%, or 99% sequence identity) thereto, encodes a multispecific antibody molecule comprising a first chain comprising a heavy chain comprising the amino acid sequence of SEQ ID NO: 5264; and a second chain comprising an scFv comprising the amino acid sequence of SEQ ID NO: 5351, fused to a light chain comprising the amino acid sequence of SEQ ID NO: 5268; or a sequence substantially identical (e.g., having at least 70%, 75%, 80%, 85%, 90%, 95%, or 99% sequence identity) to the any of the aforesaid sequences. In some embodiments, a genetic element comprising the sequence of SEQ ID NO: 5189, or a sequence substantially identical (e.g., having at least 70%, 75%, 80%, 85%, 90%, 95%, or 99% sequence identity) thereto, encodes a multispecific antibody molecule comprising a first chain comprising the amino acid sequence of SEQ ID NO: 5264, or an amino acid sequence substantially identical (e.g., having at least 70%, 75%, 80%, 85%, 90%, 95%, or 99% sequence identity) thereto; and/or a second chain comprising the amino acid sequence of SEQ ID NO: 5365, or an amino acid sequence substantially identical (e.g., having at least 70%, 75%, 80%, 85%, 90%, 95%, or 99% sequence identity) thereto.

TABLE 26
Sequence Regions in ITR to ITR Sequences

| | HER-75 (SEQ ID NO: 5190) | | | | | | |
|---|---|---|---|---|---|---|---|
| | Region | Region | Position in | | HER-93 (SEQ ID NO: 6611) | | |
| Sequence | SEQ ID | length | SEQ ID NO: | Sequence | SEQ ID | Region | Position in SEQ |
| Regions | NO | (nt) | 5190 | Regions | NO | length (nt) | ID NO: 6611 |
| 5′ ITR | 6559 | 130 | 1-130 | 5′ ITR | 6559 | 130 | 1-130 |
| CB | 6566 | 260 | 590-849 | GFAP | 6568 | 699 | 216-914 |
| promoter | | | | promoter | | | |
| Exon | 6573 | 134 | 877-1010 | Exon | 6573 | 134 | 935-1068 |
| Intron | 6578 | 32 | 1011-1042 | Intron | 6578 | 32 | 1069-1100 |
| Intron | 6580 | 347 | 1043-1389 | Intron | 6580 | 347 | 1101-1447 |
| Exon | 6576 | 53 | 1390-1442 | Exon | 6576 | 53 | 1448-1500 |
| Signal | 5032 | 57 | 1467-1523 | Signal | 5032 | 57 | 1525-1581 |
| VH | 5269 | 360 | 1524-1883 | VH | 5269 | 360 | 1582-1941 |
| Constant | 5219 | 990 | 1884-2873 | Constant | 5219 | 990 | 1942-2931 |
| Linker | 6557 | 12 | 2874-2885 | Linker | 6557 | 12 | 2932-2943 |
| Linker | 6558 | 54 | 2886-2939 | Linker | 6558 | 54 | 2944-2997 |
| Signal | 5159 | 66 | 2940-3005 | Signal | 5159 | 66 | 2998-3063 |
| VL | 5273 | 321 | 3006-3326 | VL | 5273 | 321 | 3064-3384 |
| Constant | 5221 | 321 | 3327-3647 | Constant | 5221 | 321 | 3385-3705 |
| PolyA | 6590 | 127 | 3690-3816 | PolyA | 6590 | 127 | 3748-3874 |
| 3′ ITR | 6561 | 130 | 3860-3989 | 3′ ITR | 6561 | 130 | 3918-4047 |

[1192] In some embodiments, the AAV particle comprises a genetic element comprising the nucleotide sequence of SEQ ID NO: 5190 (HER-75), SEQ ID NO: 6500 (HER-88), SEQ ID NO: 6501 (HER-89), SEQ ID NO: 6502 (HER-90), SEQ ID NO: 6503 (HER-91), SEQ ID NO: 6504 (HER-92), SEQ ID NO: 6611 (HER-93), or a nucleotide sequence substantially identical (e.g., having at least 70%, 75%, 80%, 85%, 90%, 95%, 99% or 100%, sequence identity) thereto. In some embodiments, the AAV particle comprises a genetic element comprising the nucleotide sequence of SEQ ID NO: 5190 (HER-75), or a nucleotide sequence substantially identical (e.g., having at least 70%, 75%, 80%, 85%, 90%, 95%, 99% or 100%, sequence identity) thereto. In some embodiments, the genetic element comprises the nucleotide sequence of SEQ ID NO: 5190, 6500, 6501, 6502, 6503, or a nucleotide sequence substantially identical (e.g., having at least 70%, 75%, 80%, 85%, 90%, 95%, 99% or 100%, sequence identity) thereto. In some embodiments, the genetic element comprising the nucleotide sequence of SEQ ID NO: 5190, 6500, 6501, 6502, 6503, comprises in 5′ to 3′ order: a 5′ inverted terminal repeat (ITR) sequence region comprising the nucleotide sequence of SEQ ID NO: 6559; a CB promoter comprising the nucleotide sequence of SEQ ID NO: 6566 or a GFAP promoter comprising the nucleotide sequence of SEQ ID NO: 6568; an ie1 exon 1 region comprising the nucleotide sequence of SEQ ID NO: 6573; a human beta-globin intron region comprising the nucleotide sequence of SEQ ID NO: 6578; a second human beta-globin intron region comprising the nucleotide sequence of SEQ ID NO: 6580; a human beta-globin exon region comprising the nucleotide sequence of SEQ ID NO: 6576; a heavy chain signal sequence comprising the nucleotide sequence of SEQ ID NO: 5032, a heavy chain variable region comprising the nucleotide sequence of SEQ ID NO: 5269, 6512, 6517, 6522, 6527, or 6532, and heavy chain constant region comprising the nucleotide sequence of SEQ ID NO: 5219; a furin cleavage site comprising the nucleotide sequence of SEQ ID NO: 6557; a T2A linker comprising the nucleotide sequence of SEQ ID NO: 6558; a light chain signal sequence comprising the nucleotide sequence of SEQ ID NO: 5159; a light chain variable region comprising the nucleotide sequence of SEQ ID NO: 5273, and light chain constant region comprising the nucleotide sequence of SEQ ID NO: 5221; a rabbit globin polyadenylation sequence comprising the nucleotide sequence of SEQ ID NO: 6590; and a 3′ ITR sequence region comprising the nucleotide sequence of SEQ ID NO: 6561; or a nucleotide sequence substantially identical (e.g., having at least 70%, 75%, 80%, 85%, 90%, 95%, 99% or 100%, sequence identity) to any of the aforesaid sequences. In some embodiments, disclosed herein is an antibody molecule encoded by the genetic element comprising the nucleotide sequence of SEQ ID NO: 5190 or a sequence substantially identical (e.g., having at least 70%, 75%, 80%, 85%, 90%, 95%, or 99% sequence identity) thereto. In some embodiments, the nucleotide sequence encoding the heavy chain constant region comprises a modification, e.g., a substitution, at position 897 (e.g., G897A), numbered according to 5219. In some embodiments, the nucleotide sequence encoding the heavy chain constant region comprises a G to A substitution at position 897 (G897A), numbered according to 5219. In some embodiments, the nucleotide sequence encoding the light chain variable region comprises a modification at position 69 (e.g., C69T), numbered according to SEQ ID NO: 5273. In some embodiments, the nucleotide sequence encoding the light chain variable region comprises a C to T substitution at position 69 (e.g., C69T), numbered according to SEQ ID NO: 5273.

[1193] In some embodiments, a genetic element comprising the sequence of SEQ ID NO: 5190, 6500, 6501, 6502, 6503, or a sequence substantially identical (e.g., having at least 70%, 75%, 80%, 85%, 90%, 95%, or 99% sequence identity) thereto, encodes an antibody molecule comprising a heavy chain variable region comprising a HC CDR1 amino acid sequence of SEQ ID NO: 5281, a HC CDR2 amino acid sequence of SEQ ID NO: 5282, and an HC CDR3 amino acid sequence of SEQ ID NO: 5283, 6510, 6515, 6520, 6525 or 6530; and a light chain variable region comprising an LC CDR1 amino acid sequence of SEQ ID NO: 5287, an LC CDR2 amino acid sequence of SEQ ID NO: 5288, and an LC CDR3 amino acid sequence of SEQ ID NO: 5289. In some embodiments, a genetic element comprising the sequence of SEQ ID NO: 5190, or a sequence substantially identical (e.g., having at least 70%, 75%, 80%, 85%, 90%, 95%, or 99% sequence identity) thereto, encodes an antibody molecule comprising a heavy chain variable region comprising a HC CDR1 amino acid sequence of SEQ ID NO: 5284, a HC CDR2 amino acid sequence of SEQ ID NO: 5285, and an HC CDR3 amino acid sequence of SEQ ID NO: 5286; and a light chain variable region comprising an LC CDR1 amino acid sequence of SEQ ID NO: 5287, an LC CDR2 amino acid sequence of SEQ ID NO: 5291, and an LC CDR3 amino acid sequence of SEQ ID NO: 5292.

[1194] In some embodiments, a genetic element comprising the sequence of SEQ ID NO: 5190, 6500, 6501, 6502, 6503, or a sequence substantially identical (e.g., having at least 70%, 75%, 80%, 85%, 90%, 95%, or 99% sequence identity) thereto, encodes an antibody molecule comprising a heavy chain variable region comprising the amino acid sequence of SEQ ID NO: 5270, 6511, 6516, 6521, 6526 or 6531 and/or a light chain variable region comprising the amino acid sequence of SEQ ID NO: 5274; or a sequence substantially identical (e.g., having at least 70%, 75%, 80%, 85%, 90%, 95%, or 99% sequence identity) to the any of the aforesaid sequences.

[1195] In some embodiments, a genetic element comprising the sequence of SEQ ID NO: 5190, 6500, 6501, 6502, 6503, or a sequence substantially identical (e.g., having at least 70%, 75%, 80%, 85%, 90%, 95%, or 99% sequence identity) to the any of the aforesaid sequences, encodes an antibody molecule comprising a heavy chain comprising the amino acid sequence of SEQ ID NO: 5272, 6513, 6518, 6523, 6528, 6533 and/or a light chain comprising the amino acid sequence of SEQ ID NO: 5276; or a sequence substantially identical (e.g., having at least 70%, 75%, 80%, 85%, 90%, 95%, or 99% sequence identity) to the any of the aforesaid sequences.

TABLE 40
Sequence Regions in ITR to ITR Sequences

| | HER-77 (SEQ ID NO: 5343) | | |
|---|---|---|---|
| Sequence | Region | Region length | Position in |
| Regions | SEQ ID NO | (nt) | SEQ ID NO: 5343 |
| 5′ITR | 6559 | 130 | 1-130 |
| CB promoter | 6566 | 260 | 590-849 |
| Exon | 6573 | 134 | 877-1010 |
| Intron | 6578 | 32 | 1011-1042 |
| Intron | 6580 | 347 | 1043-1389 |
| Exon | 6576 | 53 | 1390-1442 |
| Signal | 5157 | 57 | 1467-1523 |
| VH | 5330 | 360 | 1524-1883 |
| Constant | 5344 | 990 | 1884-2873 |
| Linker | 1724 | 12 | 2874-2885 |
| Linker | 1726 | 54 | 2886-2939 |
| Signal | 5159 | 66 | 2940-3005 |
| VL | 5340 | 321 | 3006-3326 |
| Constant | 5346 | 321 | 3327-3647 |
| PolyA | 6590 | 127 | 3690-3816 |
| 3′ ITR | 6561 | 130 | 3860-3989 |

[1196] In some embodiments, the AAV particle comprises a genetic element comprising the nucleotide sequence of SEQ ID NO: 5346 (HER-77), or a nucleotide sequence substantially identical (e.g., having at least 70%, 75%, 80%, 85%, 90%, 95%, 99% or 100%, sequence identity) thereto. In some embodiments, the genetic element comprises the nucleotide sequence of SEQ ID NO: 5346, or a nucleotide sequence substantially identical (e.g., having at least 70%, 75%, 80%, 85%, 90%, 95%, 99% or 100%, sequence identity) thereto. In some embodiments, the genetic element comprising the nucleotide sequence of SEQ ID NO: 5346, comprises in 5′ to 3′ order: a 5′ inverted terminal repeat (ITR) sequence region comprising the nucleotide sequence of SEQ ID NO: 6559; a CB promoter comprising the nucleotide sequence of SEQ ID NO: 6566; an ie1 exon 1 region comprising the nucleotide sequence of SEQ ID NO: 6573; a human beta-globin intron region comprising the nucleotide sequence of SEQ ID NO: 6578; a second human beta-globin intron region comprising the nucleotide sequence of SEQ ID NO: 6580; a human beta-globin exon region comprising the nucleotide sequence of SEQ ID NO: 6576; a heavy chain signal sequence comprising the nucleotide sequence of SEQ ID NO: 5157, a heavy chain variable region comprising the nucleotide sequence of SEQ ID NO: 5330, and heavy chain constant region comprising the nucleotide sequence of SEQ ID NO: 5344; a furin cleavage site comprising the nucleotide sequence of SEQ ID NO: 1724; a T2A linker comprising the nucleotide sequence of SEQ ID NO: 1726; a light chain signal sequence comprising the nucleotide sequence of SEQ ID NO: 5340; a light chain variable region comprising the nucleotide sequence of SEQ ID NO: 5346, and light chain constant region comprising the nucleotide sequence of SEQ ID NO: 5221; a rabbit globin polyadenylation sequence comprising the nucleotide sequence of SEQ ID NO: 6590; and a 3′ ITR sequence region comprising the nucleotide sequence of SEQ ID NO: 6561; or a nucleotide sequence substantially identical (e.g., having at least 70%, 75%, 80%, 85%, 90%, 95%, 99% or 100%, sequence identity) to any of the aforesaid sequences. In some embodiments, disclosed herein is an antibody molecule encoded by the genetic element comprising the nucleotide sequence of SEQ ID NO: 5343 or a sequence substantially identical (e.g., having at least 70%, 75%, 80%, 85%, 90%, 95%, or 99% sequence identity) thereto.

[1197] In some embodiments, a genetic element comprising the sequence of SEQ ID NO: 5343, or a sequence substantially identical (e.g., having at least 70%, 75%, 80%, 85%, 90%, 95%, or 99% sequence identity) thereto, encodes an antibody molecule comprising a heavy chain variable region comprising a HC CDR1 amino acid sequence of SEQ ID NO: 5281, a HC CDR2 amino acid sequence of SEQ ID NO: 5282, and an HC CDR3 amino acid sequence of SEQ ID NO: 5283; and a light chain variable region comprising an LC CDR1 amino acid sequence of SEQ ID NO: 5287, an LC CDR2 amino acid sequence of SEQ ID NO: 5288, and an LC CDR3 amino acid sequence of SEQ ID NO: 5289. In some embodiments, a genetic element comprising the sequence of SEQ ID NO: 5343, or a sequence substantially identical (e.g., having at least 70%, 75%, 80%, 85%, 90%, 95%, or 99% sequence identity) thereto, encodes an antibody molecule comprising a heavy chain variable region comprising a HC CDR1 amino acid sequence of SEQ ID NO: 5284, a HC CDR2 amino acid sequence of SEQ ID NO: 5285, and an HC CDR3 amino acid sequence of SEQ ID NO: 5286; and a light chain variable region comprising an LC CDR1 amino acid sequence of SEQ ID NO: 5287, an LC CDR2 amino acid sequence of SEQ ID NO: 5291, and an LC CDR3 amino acid sequence of SEQ ID NO: 5292.

[1198] In some embodiments, a genetic element comprising the sequence of SEQ ID NO: 5343, or a sequence substantially identical (e.g., having at least 70%, 75%, 80%, 85%, 90%, 95%, or 99% sequence identity) thereto, encodes an antibody molecule comprising a heavy chain variable region comprising the amino acid sequence of SEQ ID NO: 5329 and/or a light chain variable region comprising the amino acid sequence of SEQ ID NO: 5339; or a sequence substantially identical (e.g., having at least 70%, 75%, 80%, 85%, 90%, 95%, or 99% sequence identity) to the any of the aforesaid sequences.

[1199] In some embodiments, a genetic element comprising the sequence of SEQ ID NO: 5343, or a sequence substantially identical (e.g., having at least 70%, 75%, 80%, 85%, 90%, 95%, or 99% sequence identity) to the any of the aforesaid sequences, encodes an antibody molecule comprising a heavy chain comprising the amino acid sequence of SEQ ID NO: 5331 and/or a light chain comprising the amino acid sequence of SEQ ID NO: 5341; or a sequence substantially identical (e.g., having at least 70%, 75%, 80%, 85%, 90%, 95%, or 99% sequence identity) to the any of the aforesaid sequences.

TABLE 42
Sequence Regions in ITR to ITR Sequences

| | HER-82 (SEQ ID NO: 5374) | | |
|---|---|---|---|
| | Region | Region length | Position in |
| Sequence Regions | SEQ ID NO | (nt) | SEQ ID NO: 5374 |
| 5′ ITR | 6559 | 130 | 1-130 |
| CB promoter | 6566 | 260 | 590-849 |
| Exon | 6573 | 134 | 877-1010 |
| Intron | 6578 | 32 | 1011-1042 |
| Intron | 6580 | 347 | 1043-1389 |
| Exon | 6576 | 53 | 1390-1442 |
| Signal | 5157 | 57 | 1467-1523 |
| VH | 5002 | 360 | 1524-1883 |
| Constant | 5017 | 990 | 1884-2873 |
| Linker | 1724 | 12 | 2874-2885 |
| Linker | 1726 | 54 | 2886-2939 |
| Signal | 5159 | 66 | 2940-3005 |
| DARPIN | 5371 | 471 | 3006-3476 |
| Linker | 5347 | 45 | 3477-3521 |
| VL | 5005 | 321 | 3522-3842 |
| Constant | 5007 | 321 | 3843-4163 |
| PolyA | 6590 | 127 | 4206-4332 |
| 3′ ITR | 6561 | 130 | 4376-4505 |

[1200] In some embodiments, the AAV particle comprises a genetic element comprising the nucleotide sequence of SEQ ID NO: 5374 (HER-82), or a nucleotide sequence substantially identical (e.g., having at least 70%, 75%, 80%, 85%, 90%, 95%, 99% or 100%, sequence identity) thereto. In some embodiments, the genetic element comprises the nucleotide sequence of SEQ ID NO: 5374, or a nucleotide sequence substantially identical (e.g., having at least 70%, 75%, 80%, 85%, 90%, 95%, 99% or 100%, sequence identity) thereto. In some embodiments, the genetic element comprising the nucleotide sequence of SEQ ID NO: 5374, comprises in 5′ to 3′ order: a 5′ inverted terminal repeat (ITR) sequence region comprising the nucleotide sequence of SEQ ID NO: 6559; a CB promoter comprising the nucleotide sequence of SEQ ID NO: 6566; an ie1 exon 1 region comprising the nucleotide sequence of SEQ ID NO: 6573; a human beta-globin intron region comprising the nucleotide sequence of SEQ ID NO: 6578; a second human beta-globin intron region comprising the nucleotide sequence of SEQ ID NO: 6580; a human beta-globin exon region comprising the nucleotide sequence of SEQ ID NO: 6576; a heavy chain signal sequence comprising the nucleotide sequence of SEQ ID NO: 5157, a heavy chain variable region comprising the nucleotide sequence of SEQ ID NO: 5002, a heavy chain constant region comprising the nucleotide sequence of SEQ ID NO: 5017; a furin cleavage site comprising the nucleotide sequence of SEQ ID NO: 1724; a T2A linker comprising the nucleotide sequence of SEQ ID NO: 1726; a light chain signal sequence comprising the nucleotide sequence of SEQ ID NO: 5159; a DARPIN molecule comprising the nucleotide sequence of SEQ ID NO: 5371; a linker region comprising the nucleotide sequence of SEQ ID NO: 5347; a light chain variable region comprising the nucleotide sequence of SEQ ID NO: 5005; a light chain constant region comprising the nucleotide sequence of SEQ ID NO: 5007; a rabbit globin polyadenylation sequence comprising the nucleotide sequence of SEQ ID NO: 6590; and a 3′ ITR sequence region comprising the nucleotide sequence of SEQ ID NO: 6561; or a nucleotide sequence substantially identical (e.g., having at least 70%, 75%, 80%, 85%, 90%, 95%, 99% or 100%, sequence identity) to any of the aforesaid sequences. In some embodiments, disclosed herein is an antibody molecule encoded by the genetic element comprising the nucleotide sequence of SEQ ID NO: 5374 or a sequence substantially identical (e.g., having at least 70%, 75%, 80%, 85%, 90%, 95%, or 99% sequence identity) thereto.

[1201] In some embodiments, a genetic element comprising the sequence of SEQ ID NO: 5374, or a sequence substantially identical (e.g., having at least 70%, 75%, 80%, 85%, 90%, 95%, or 99% sequence identity) thereto, encodes a multispecific, e.g., bispecific or biparatopic, antibody molecule, comprising a first antigen binding domain that binds domain IV of a HER2 antigen and a second antigen binding domain that binds domain I of a HER2 antigen. In some embodiments, the first antigen binding domain comprises a full antibody. In some embodiments, the second antigen binding domain comprises a DARPIN molecule. In some embodiments, the first antigen binding domain comprises a heavy chain variable region comprising a HC CDR1 amino acid sequence of SEQ ID NO: 5361, a HC CDR2 amino acid sequence of SEQ ID NO: 5362, and an HC CDR3 amino acid sequence of SEQ ID NO: 5363; and a light chain variable region comprising an LC CDR1 amino acid sequence of SEQ ID NO: 5317, an LC CDR2 amino acid sequence of SEQ ID NO: 5318, and an LC CDR3 amino acid sequence of SEQ ID NO: 5319. In some embodiments, the second antigen binding domain comprises the amino acid sequence of SEQ ID NO: 5370, or an amino acid sequence substantially identical (e.g., having at least 70%, 75%, 80%, 85%, 90%, 95%, or 99% sequence identity) thereto.

[1202] In some embodiments, a genetic element comprising the sequence of SEQ ID NO: 5374, or a sequence substantially identical (e.g., having at least 70%, 75%, 80%, 85%, 90%, 95%, or 99% sequence identity) thereto, encodes a multispecific antibody molecule, comprising: a first chain, comprising from the N-terminus to the C-terminus, an anti-HER2 VH comprising the amino sequence comprising the amino acid sequence of SEQ ID NO: 5001, and a heavy chain constant region comprising the amino acid sequence of SEQ ID NO: 5018; and a second chain, comprising from the N-terminus to the C-terminus, a DARPIN molecule comprising the amino acid sequence of SEQ ID NO: 5370, a (G4S)3 linker (SEQ ID NO: 4537), an anti-HER2 VL comprising the amino acid sequence of SEQ ID NO: 5006, and a light chain constant region (CL) comprising the amino acid sequence of SEQ ID NO: 5008; or a sequence substantially identical (e.g., having at least 70%, 75%, 80%, 85%, 90%, 95%, or 99% sequence identity) to the any of the aforesaid sequences.

[1203] In some embodiments, a genetic element comprising the sequence of SEQ ID NO: 5374, or a sequence substantially identical (e.g., having at least 70%, 75%, 80%, 85%, 90%, 95%, or 99% sequence identity) thereto, encodes a multispecific antibody molecule, comprising a first chain comprising the amino acid sequence of SEQ ID NO: 5368; and a second chain comprising the amino acid sequence of SEQ ID NO: 5370, a (G4S)3 linker (SEQ ID NO: 4537), and the amino acid sequence comprising of SEQ ID NO: 5063; or a sequence substantially identical (e.g., having at least 70%, 75%, 80%, 85%, 90%, 95%, or 99% sequence identity) to the any of the aforesaid sequences. In some embodiments, a genetic element comprising the sequence of SEQ ID NO: 5374, or a sequence substantially identical (e.g., having at least 70%, 75%, 80%, 85%, 90%, 95%, or 99% sequence identity) thereto, encodes a multispecific antibody molecule, comprising a first chain comprising the amino acid sequence of SEQ ID NO: 5368, and a second chain comprising the amino acid sequence of SEQ ID NO: 5372; or a sequence substantially identical (e.g., having at least 70%, 75%, 80%, 85%, 90%, 95%, or 99% sequence identity) to the any of the aforesaid sequences.

TABLE 43
Sequence Regions in ITR to ITR Sequences

| | HER-78 (SEQ ID NO: 5375) | | |
|---|---|---|---|
| | Region | Region length | Position in |
| Sequence Regions | SEQ ID NO | (nt) | SEQ ID NO: 5375 |
| 5′ ITR | 6559 | 130 | 1-130 |
| CB promoter | 6566 | 260 | 590-849 |
| Exon | 6573 | 134 | 877-1010 |
| Intron | 6578 | 32 | 1011-1042 |
| Intron | 6580 | 347 | 1043-1389 |
| Exon | 6576 | 53 | 1390-1442 |
| Signal | 5157 | 57 | 1467-1523 |
| VH | 5261 | 360 | 1524-1883 |
| Constant | 5219 | 990 | 1884-2873 |
| Linker | 6557 | 12 | 2874-2885 |
| Linker | 6558 | 54 | 2886-2939 |
| Signal | 5159 | 66 | 2940-3005 |
| VH | 6552 | 360 | 3006-3365 |
| Linker | 5347 | 45 | 3366-3410 |
| VL | 5265 | 321 | 3411-3731 |
| Linker | GGCTCT | 6 | 3732-3737 |
| VL | 5353 | 339 | 3738-4076 |
| Constant | 5217 | 321 | 4077-4397 |
| PolyA | 6590 | 127 | 4440-4566 |
| 3′ ITR | 6561 | 130 | 4610-4739 |

[1204] In some embodiments, the AAV particle comprises a genetic element comprising the nucleotide sequence of SEQ ID NO: 5375 (HER-78), 6505 (HER-97), 6506 (HER-98), 6507 (HER-99), 6508 (HER-100), 6509 (HER-101), or a nucleotide sequence substantially identical (e.g., having at least 70%, 75%, 80%, 85%, 90%, 95%, 99% or 100%, sequence identity) thereto. In some embodiments, the genetic element comprises the nucleotide sequence of SEQ ID NO: 5375, 6505, 6506, 6507, 6508, 6509, or a nucleotide sequence substantially identical (e.g., having at least 70%, 75%, 80%, 85%, 90%, 95%, 99% or 100%, sequence identity) thereto. In some embodiments, the genetic element comprising the nucleotide sequence of SEQ ID NO: 5375, 6505, 6506, 6507, 6508, or 6509, comprises in 5′ to 3′ order: a 5′ inverted terminal repeat (ITR) sequence region comprising the nucleotide sequence of SEQ ID NO: 6559; a CB promoter comprising the nucleotide sequence of SEQ ID NO: 6566; an ie1 exon 1 region comprising the nucleotide sequence of SEQ ID NO: 6573; a human beta-globin intron region comprising the nucleotide sequence of SEQ ID NO: 6578; a second human beta-globin intron region comprising the nucleotide sequence of SEQ ID NO: 6580; a human beta-globin exon region comprising the nucleotide sequence of SEQ ID NO: 6576; a heavy chain signal sequence comprising the nucleotide sequence of SEQ ID NO: 5157, a heavy chain variable region comprising the nucleotide sequence of SEQ ID NO: 5261, a heavy chain constant region comprising the nucleotide sequence of SEQ ID NO: 5219; a furin cleavage site comprising the nucleotide sequence of SEQ ID NO: 6557; a T2A linker comprising the nucleotide sequence of SEQ ID NO: 6558; a light chain signal sequence comprising the nucleotide sequence of SEQ ID NO: 5159; a heavy chain variable region comprising the nucleotide sequence of SEQ ID NO: 6552, 6537, 6540, 6543, 6546, or 6549, a linker region comprising the nucleotide sequence of SEQ ID NO: 5347, and a light chain variable region comprising the nucleotide sequence of SEQ ID NO: 5265; a linker comprising the nucleotide sequence of GGCTCT; a light chain variable region comprising the nucleotide sequence of SEQ ID NO: 5353, and a light chain constant region comprising the nucleotide sequence of SEQ ID NO: 5217; a rabbit globin polyadenylation sequence comprising the nucleotide sequence of SEQ ID NO: 6590; and a 3′ ITR sequence region comprising the nucleotide sequence of SEQ ID NO: 6561; or a nucleotide sequence substantially identical (e.g., having at least 70%, 75%, 80%, 85%, 90%, 95%, 99% or 100%, sequence identity) to any of the aforesaid sequences. In some embodiments, disclosed herein is an antibody molecule encoded by the genetic element comprising the nucleotide sequence of SEQ ID NO: 5375, 6505, 6506, 6507, 6508, 6509, or a sequence substantially identical (e.g., having at least 70%, 75%, 80%, 85%, 90%, 95%, or 99% sequence identity) thereto.

[1205] In some embodiments, a genetic element comprising the sequence of SEQ ID NO: 5375, 6505, 6506, 6507, 6508, 6509, or a sequence substantially identical (e.g., having at least 70%, 75%, 80%, 85%, 90%, 95%, or 99% sequence identity) thereto, encodes a multispecific, e.g., bispecific or biparatopic, antibody molecule, comprising a first antigen binding domain that binds domain I of a HER2 antigen and a second antigen binding domain that binds domain IV of a HER2 antigen. In some embodiments, the first antigen binding domain comprises a full antibody. In some embodiments, the second antigen binding domain comprises an scFv. In some embodiments, the first antigen binding domain comprises a heavy chain variable region comprising a HC CDR1 amino acid sequence of SEQ ID NO: 5358, a HC CDR2 amino acid sequence of SEQ ID NO: 5359, and an HC CDR3 amino acid sequence of SEQ ID NO: 5360, 6535, 6538, 6541, 6544, or 6547; and a light chain variable region comprising an LC CDR1 amino acid sequence of SEQ ID NO: 5355, an LC CDR2 amino acid sequence of SEQ ID NO: 5356, and an LC CDR3 amino acid sequence of SEQ ID NO: 5357. In some embodiments, the second antigen binding domain comprises a HC CDR1 amino acid sequence of SEQ ID NO: 5361, a HC CDR2 amino acid sequence of SEQ ID NO: 5362, and an HC CDR3 amino acid sequence of SEQ ID NO: 5363; and a light chain variable region comprising an LC CDR1 amino acid sequence of SEQ ID NO: 5317, an LC CDR2 amino acid sequence of SEQ ID NO: 5318, and an LC CDR3 amino acid sequence of SEQ ID NO: 5319.

[1206] In some embodiments, a genetic element comprising the sequence of SEQ ID NO: 5375, 6505, 6506, 6507, 6508, 6509, or a sequence substantially identical (e.g., having at least 70%, 75%, 80%, 85%, 90%, 95%, or 99% sequence identity) thereto, encodes a multispecific antibody molecule comprising a first chain, which comprises, from the N-terminus to the C-terminus, a first anti-HER2 VH comprising the amino acid sequence of SEQ ID NO: 5262, and a heavy chain constant region comprising the amino acid sequence of SEQ ID NO: 5220; and a second chain, which comprises from the N-terminus to the C-terminus, a second anti-HER2 VH comprising the amino sequence of SEQ ID NO: 5290, 6536, 6539, 6542, 6545, or 6548, a (G4S)3 linker (SEQ ID NO: 4537), a first anti-HER2 VL comprising the amino acid sequence of SEQ ID NO: 5266, a (GS) linker, a second anti-HER2 VL comprising the amino acid sequence of SEQ ID NO: 5354, and a light chain constant region (CL) comprising the amino acid sequence of SEQ ID NO: 5218; or a sequence substantially identical (e.g., having at least 70%, 75%, 80%, 85%, 90%, 95%, or 99% sequence identity) to the any of the aforesaid sequences.

[1207] In some embodiments, a genetic element comprising the sequence of SEQ ID NO: 5375, or a sequence substantially identical (e.g., having at least 70%, 75%, 80%, 85%, 90%, 95%, or 99% sequence identity) thereto, encodes a multispecific antibody molecule comprising a first chain comprising a heavy chain comprising the amino acid sequence of SEQ ID NO: 5376; and a second chain comprising an scFv comprising the amino acid sequence of SEQ ID NO: 5351, fused to a light chain comprising the amino acid sequence of SEQ ID NO: 5268; or a sequence substantially identical (e.g., having at least 70%, 75%, 80%, 85%, 90%, 95%, or 99% sequence identity) to the any of the aforesaid sequences. In some embodiments, a genetic element comprising the sequence of SEQ ID NO: 5375, or a sequence substantially identical (e.g., having at least 70%, 75%, 80%, 85%, 90%, 95%, or 99% sequence identity) thereto, encodes a multispecific antibody molecule comprising a first chain comprising the amino acid sequence of SEQ ID NO: 5376, or an amino acid sequence substantially identical (e.g., having at least 70%, 75%, 80%, 85%, 90%, 95%, or 99% sequence identity) thereto; and/or a second chain comprising the amino acid sequence of SEQ ID NO: 5365, or an amino acid sequence substantially identical (e.g., having at least 70%, 75%, 80%, 85%, 90%, 95%, or 99% sequence identity) thereto.

[1208] In some embodiment, the AAV particle comprises an AAV vector comprising a genetic element comprising the nucleotide sequence of any of the genetic elements described herein, e.g., as described in Tables 6, 17-19, 23-26, 40, 42, 43, 68, and 69, or a nucleotide sequence substantially identical (e.g., having at least about 70%, 75%, 80%, 85%, 90%, 92%, 95%, 97%, 98%, or 99% sequence identity). In some embodiments, the AAV vector further comprises a nucleotide sequence encoding a capsid protein, e.g., a structural protein. In some embodiments, the capsid protein comprises a VP1 polypeptide, a VP2 polypeptide, and/or a VP3 polypeptide. In some embodiments, the VP1 polypeptide, the VP2 polypeptide, and/or the VP3 polypeptide are encoded by at least one Cap gene. In some embodiments, the AAV vector further encodes a Rep protein, e.g., a non-structural protein. In some embodiments, the Rep protein comprises a Rep78 protein, a Rep68, Rep52 protein, and/or a Rep40 protein. In some embodiments, the Rep78 protein, the Rep68 protein, the Rep52 protein, and/or the Rep40 protein are encoded by at least one Rep gene.

[1209] In some embodiment, the AAV particle comprising a genetic element comprising the nucleotide sequence of any of the genetic elements described herein, e.g., as described in Tables 6, 17-19, 23-26, 40, 42, 43, 68, and 69, or a nucleotide sequence substantially identical (e.g., having at least about 70%, 75%, 80%, 85%, 90%, 92%, 95%, 97%, 98%, or 99% sequence identity) to any of the aforesaid sequences comprises, e.g., is packaged in, an AAV capsid polypeptide, e.g., an AAV capsid variant provided in any of Tables 1 or 37-39. For example, the AAV capsid polypeptide, e.g., AAV capsid variant comprises a VOY101 capsid polypeptide, a VOY9P39 capsid polypeptide, a VOY9P33 capsid polypeptide, a AAVPHP.B (PHP.B) capsid polypeptide, a AAVPHP.N (PHP.N) capsid polypeptide, an AAV1 capsid polypeptide, an AAV2 capsid polypeptide, an AAV5 capsid polypeptide, an AAV9 capsid polypeptide, an AAVrh10 capsid polypeptide, or a functional variant thereof.

[1210] In some embodiments, the AAV particle comprising a genetic element comprising the nucleotide sequence of any of the genetic elements described herein, e.g., as described in Tables 6, 17-19, 23-26, 40, 42, 43, 68, and 69, or a nucleotide sequence substantially identical (e.g., having at least about 70%, 75%, 80%, 85%, 90%, 92%, 95%, 97%, 98%, or 99% sequence identity) to any of the aforesaid sequences comprises a VOY101 capsid polypeptide or functional variant thereof. In some embodiments, the AAV particle comprising a genetic element comprising the nucleotide sequence of any of the genetic elements described herein, e.g., as described in Tables 6, 17-19, 23-26, 40, 42, 43, 68, and 69, or a nucleotide sequence substantially identical (e.g., having at least about 70%, 75%, 80%, 85%, 90%, 92%, 95%, 97%, 98%, or 99% sequence identity) to any of the aforesaid sequences comprises an AAV capsid polypeptide, e.g., an AAV capsid variant, comprising the amino acid sequence of SEQ ID NO: 1, or an amino acid sequence substantially identical (e.g., having at least 70%, 75%, 80%, 85%, 90%, 95% or 99%) thereto.

[1211] In some embodiments, the AAV particle comprising a genetic element comprising the nucleotide sequence of any of the genetic elements described herein, e.g., as described in Tables 6, 17-19, 23-26, 40, 42, 43, 68, and 69, or a nucleotide sequence substantially identical (e.g., having at least about 70%, 75%, 80%, 85%, 90%, 92%, 95%, 97%, 98%, or 99% sequence identity) to any of the aforesaid sequences comprises an AAV capsid polypeptide, e.g., an AAV capsid variant, comprising an amino acid sequence having at least one, two or three modifications, but not more than 30, 20 or 10 modifications of the amino acid sequence of SEQ ID NO: 1.

[1212] In some embodiments, the AAV particle comprising a genetic element comprising the nucleotide sequence of any of the genetic elements described herein, e.g., as described in Tables 6, 17-19, 23-26, 40, 42, 43, 68, and 69, or a nucleotide sequence substantially identical (e.g., having at least about 70%, 75%, 80%, 85%, 90%, 92%, 95%, 97%, 98%, or 99% sequence identity) to any of the aforesaid sequences comprises an AAV capsid polypeptide, e.g., an AAV capsid variant, comprising the amino acid sequence of SEQ ID NO: 138, or a sequence substantially identical (e.g., having at least about 70%, 75%, 80%, 85%, 90%, 92%, 95%, 97%, 98%, or 99% sequence identity) thereto. In some embodiments, the AAV particle comprising a genetic element comprising the nucleotide sequence of any of the genetic elements described herein, e.g., as described in Tables 6, 17-19, 23-26, 40, 42, 43, 68, and 69, or a nucleotide sequence substantially identical (e.g., having at least about 70%, 75%, 80%, 85%, 90%, 92%, 95%, 97%, 98%, or 99% sequence identity) to any of the aforesaid sequences comprises an AAV capsid polypeptide, e.g., an AAV capsid variant, comprising an amino acid sequence having at least one, two or three modifications, but not more than 30, 20 or 10 modifications of the amino acid sequence of SEQ ID NO: 138. In some embodiments, the AAV particle comprising a genetic element comprising the nucleotide sequence of any of the genetic elements described herein, e.g., as described in Tables 6, 17-19, 23-26, 40, 42, 43, 68, and 69, or a nucleotide sequence substantially identical (e.g., having at least about 70%, 75%, 80%, 85%, 90%, 92%, 95%, 97%, 98%, or 99% sequence identity) to any of the aforesaid sequences comprises an AAV capsid polypeptide, e.g., an AAV capsid variant, encoded by the nucleotide sequence of SEQ ID NO: 137, or a nucleotide sequence substantially identical (e.g., having at least 70%, 75%, 80%, 85%, 90%, 95% or 99%) thereto. In some embodiments, the capsid protein comprises an amino acid substitution at position K449, e.g., a K449R substitution, numbered according to SEQ ID NO: 138. In some embodiments, the capsid protein comprises an insert comprising the amino acid sequence of TLAVPFK (SEQ ID NO: 1262), wherein the insert is present immediately subsequent to position 588, relative to a reference sequence numbered according to SEQ ID NO:138. In some embodiments, the capsid protein comprises an amino acid other than “A” at position 587 and/or an amino acid other than “Q” at position 588, numbered according to SEQ ID NO: 138. In some embodiments, the capsid protein comprises the amino acid substitution of A587D and/or Q588G, numbered according to SEQ ID NO: 138.

[1213] In some embodiments, the AAV particle comprising a genetic element comprising the nucleotide sequence of any of the genetic elements described herein, e.g., as described in Tables 6, 17-19, 23-26, 40, 42, 43, 68, and 69, or a nucleotide sequence substantially identical (e.g., having at least about 70%, 75%, 80%, 85%, 90%, 92%, 95%, 97%, 98%, or 99% sequence identity) to any of the aforesaid sequences comprises an AAV capsid polypeptide, e.g., an AAV capsid variant, comprising the amino acid sequence of SEQ ID NO: 12, or a sequence substantially identical (e.g., having at least about 70%, 75%, 80%, 85%, 90%, 92%, 95%, 97%, 98%, or 99% sequence identity) thereto. In some embodiments, the AAV particle comprising a genetic element comprising the nucleotide sequence of any of the genetic elements described herein, e.g., as described in Tables 6, 17-19, 23-26, 40, 42, 43, 68, and 69, or a nucleotide sequence substantially identical (e.g., having at least about 70%, 75%, 80%, 85%, 90%, 92%, 95%, 97%, 98%, or 99% sequence identity) to any of the aforesaid sequences comprises an AAV capsid polypeptide, e.g., an AAV capsid variant, comprising an amino acid sequence having at least one, two or three modifications, but not more than 30, 20 or 10 modifications of the amino acid sequence of SEQ ID NO: 12.

[1214] In some embodiments, the AAV particle comprising a genetic element comprising the nucleotide sequence of any of the genetic elements described herein, e.g., as described in Tables 6, 17-19, 23-26, 40, 42, 43, 68, and 69, or a nucleotide sequence substantially identical (e.g., having at least about 70%, 75%, 80%, 85%, 90%, 92%, 95%, 97%, 98%, or 99% sequence identity) to any of the aforesaid sequences comprises an AAV capsid polypeptide, e.g., an AAV capsid variant, comprising the amino acid sequence of SEQ ID NO: 14, or a sequence substantially identical (e.g., having at least about 70%, 75%, 80%, 85%, 90%, 92%, 95%, 97%, 98%, or 99% sequence identity) thereto. In some embodiments, the AAV particle comprising a genetic element comprising the nucleotide sequence of any of the genetic elements described herein, e.g., as described in 6, 17-19, 23-26, 40, 42, 43, 68, and 69, or a nucleotide sequence substantially identical (e.g., having at least about 70%, 75%, 80%, 85%, 90%, 92%, 95%, 97%, 98%, or 99% sequence identity) to any of the aforesaid sequences comprises an AAV capsid polypeptide, e.g., an AAV capsid variant, comprising an amino acid sequence having at least one, two or three modifications, but not more than 30, 20 or 10 modifications of the amino acid sequence of SEQ ID NO: 14.

[1215] In some embodiments, the AAV particle comprising a genetic element comprising the nucleotide sequence of any of the genetic elements described herein, e.g., as described in 6, 17-19, 23-26, 40, 42, 43, 68, and 69, or a nucleotide sequence substantially identical (e.g., having at least about 70%, 75%, 80%, 85%, 90%, 92%, 95%, 97%, 98%, or 99% sequence identity) to any of the aforesaid sequences comprises an AAV capsid polypeptide, e.g., an AAV capsid variant, comprising the amino acid sequence of any one of SEQ ID NO: 981 or 982, or an amino acid sequence with at least 80% (e.g., at least about 85, 90, 95, 96, 97, 98, or 99%) sequence identity thereto.

[1216] In some embodiments, the AAV particle comprises a genetic element comprising a nucleotide sequence encoding one or more antibodies directed against HER2 or its ligands. Exemplary HER2 antibodies and target ligands have been described in Hudziak et al., Mol. Cell. Biol. 9(3):1165-1172 (1989); Tagliabue et al. Int. J. Cancer 47:933-937 (1991); McKenzie et al. Oncogene 4:543-548 (1989); Maier et al. Cancer Res. 51:5361-5369 (1991); Bacus et al. Molecular Carcinogenesis 3:350-362 (1990); Stancovski et al. PNAS (USA) 88:8691-8695 (1991); Bacus et al. Cancer Research 52:2580-2589 (1992); Xu et al. Int. J. Cancer 53:401-408 (1993); WO94/00136; Kasprzyk et al. Cancer Research 52:2771-2776 (1992); Hancock et al. Cancer Res. 51:4575-4580 (1991); Shawver et al. Cancer Res. 54:1367-1373 (1994); Arteaga et al. Cancer Res. 54:3758-3765 (1994); Harwerth et al. J. Biol. Chem. 267:15160-15167 (1992); U.S. Pat. No. 5,783,186; Klapper et al. Oncogene 14:2099-2109 (1997); WO 98/17797; and U.S. Pat. No. 5,783,186. In one embodiment, the payload region of the AAV particle comprises one or more nucleic acid sequences encoding one or more of the payload antibody polypeptides related to HER2 listed in Table 28 (APA1-APA236; SEQ ID NO: 6000-6235). Exemplary additional payloads related to HER2 are disclosed in Table 28. The antibody sequences for each of these antibodies are disclosed in the reference information column of Table 28, the contents of each are incorporated herein in their entirety.

TABLE 28
Additional Payload Antibodies Related to HER2

| Antibody | Target | Description | Reference |
|---|---|---|---|
| No. | No | No. | Information |
| APA1 | 1 | 1 | U.S Pat. No. 8,802,093 SEQ ID NO: 11 |
| APA2 | 1 | 1 | WO2013096812 SEQ ID NO: 8 |
| APA3 | 1 | 3 | U.S Pat. No. 5,720,954; U.S Pat. No. 5,770,195; |
| | | | U.S Pat. No. 5,772,997; U.S Pat. No. 6,165,464; |
| | | | U.S Pat. No. 6,387,371; U.S Pat. No. 6,399,063 |
| APA4 | 1 | 5 | U.S Pat. No. 8,557,243 |
| APA5 | 1 | 6 | U.S Pat. No. 8,557,243 |
| APA6 | 1 | 7 | U.S Pat. No. 8,557,243 |
| APA7 | 1 | 2 | U.S Pat. No. 8,557,243 |
| APA8 | 1 | 8 | U.S Pat. No. 5,720,954; U.S Pat. No. 5,770,195; |
| | | | U.S Pat. No. 5,772,997; U.S Pat. No. 6,165,464; |
| | | | U.S Pat. No. 6,387,371; U.S Pat. No. 6,399,063 |
| APA9 | 1 | 9 | U.S Pat. No. 5,720,954; U.S Pat. No. 5,770,195; |
| | | | U.S Pat. No. 5,772,997; U.S Pat. No. 6,165,464; |
| | | | U.S Pat. No. 6,387,371; U.S Pat. No. 6,399,063 |
| APA10 | 1 | 10 | U.S Pat. No. 8,802,093 SEQ ID NO: 2 |
| APA11 | 1 | 10 | WO2013096812 SEQ ID NO: 7 |
| APA12 | 1 | 12 | U.S Pat. No. 5,720,954; U.S Pat. No. 5,770,195; |
| | | | U.S Pat. No. 5,772,997; U.S Pat. No. 6,165,464; |
| | | | U.S Pat. No. 6,387,371; U.S Pat. No. 6,399,063 |
| APA13 | 1 | 12 | U.S Pat. No. 5,720,954; U.S Pat. No. 5,770,195; |
| | | | U.S Pat. No. 5,772,997; U.S Pat. No. 6,165,464; |
| | | | U.S Pat. No. 6,387,371; U.S Pat. No. 6,399,063 |
| APA14 | 1 | 13 | U.S Pat. No. 5,720,954; U.S Pat. No. 5,770,195; |
| | | | U.S Pat. No. 5,772,997; U.S Pat. No. 6,165,464; |
| | | | U.S Pat. No. 6,387,371; U.S Pat. No. 6,399,063 |
| APA15 | 1 | 11 | U.S Pat. No. 8,557,243 |
| APA16 | 1 | 14 | U.S Pat. No. 8,557,243 |
| APA17 | 1 | 15 | U.S Pat. No. 8,557,243 |
| APA18 | 1 | 16 | U.S Pat. No. 8,557,243 |
| APA19 | 1 | 1 | US20130089544 SEQ ID NO: 54 |
| APA20 | 1 | 1 | US20130089544 SEQ ID NO: 56 |
| APA21 | 1 | 1 | US20130089544 SEQ ID NO: 57 |
| APA22 | 1 | 1 | US20130089544 SEQ ID NO: 58 |
| APA23 | 1 | 1 | US20130089544 SEQ ID NO: 59 |
| APA24 | 1 | 1 | US20130266564 SEQ ID NO: 10 |
| APA25 | 1 | 1 | US20130266564 SEQ ID NO: 20 |
| APA26 | 1 | 1 | US20130266564 SEQ ID NO: 25 |
| APA27 | 1 | 1 | US20130266564 SEQ ID NO: 26 |
| APA28 | 1 | 1 | US20140010814 SEQ ID NO: 25 |
| APA29 | 1 | 1 | US20140010814 SEQ ID NO: 37 |
| APA30 | 1 | 1 | US20140010814 SEQ ID NO: 39 |
| APA31 | 2 | 1 | US20100136033 SEQ ID NO: 3; |
| | | | US20110129464 SEQ ID NO: 6 |
| APA32 | 2 | 4 | US20160053011 SEQ ID NO: 14 |
| APA33 | 1 | 2 | US20110129464 SEQ ID NO: 2 |
| APA34 | 1 | 2 | US20130089544 SEQ ID NO: 2 |
| APA35 | 1 | 2 | US20130089544 SEQ ID NO: 6 |
| APA36 | 1 | 2 | US20130089544 SEQ ID NO: 10 |
| APA37 | 1 | 2 | US20130089544 SEQ ID NO: 14, |
| | | | 18, 22, 34, 38 |
| APA38 | 1 | 2 | US20130089544 SEQ ID NO: 26 |
| APA39 | 1 | 2 | US20130089544 SEQ ID NO: 30 |
| APA40 | 1 | 2 | US20130089544 SEQ ID NO: 42 |
| APA41 | 1 | 2 | US20130089544 SEQ ID NO: 4 |
| APA42 | 1 | 2 | US20130266564 SEQ ID NO: 8 |
| APA43 | 2 | 2 | US20160089435 SEQ ID NO: 42 |
| APA44 | 2 | 2 | US20080226659 SEQ ID NO: 1; |
| | | | US20090226455 SEQ ID NO: 2; |
| | | | US20100136033 SEQ ID NO: 1 |
| APA45 | 2 | 2 | US20080226659 SEQ ID NO: 2; |
| | | | US20090226455 SEQ ID NO: 4; |
| | | | US20100136033 SEQ ID NO: 2; |
| | | | US20110129464 SEQ ID NO: 4 |
| APA46 | 2 | 2 | US20130171148 SEQ ID NO: 1 |
| APA47 | 2 | 2 | US20130171148 SEQ ID NO: 8 |
| APA48 | 2 | 2 | US20130171148 SEQ ID NO: 15 |
| APA49 | 2 | 2 | US20130171148 SEQ ID NO: 22 |
| APA50 | 2 | 2 | US20130171148 SEQ ID NO: 29 |
| APA51 | 2 | 2 | US20130171148 SEQ ID NO: 36 |
| APA52 | 2 | 2 | US20130171148 SEQ ID NO: 43 |
| APA53 | 2 | 2 | US20130171148 SEQ ID NO: 45 |
| APA54 | 2 | 2 | US20130171148 SEQ ID NO: 47 |
| APA55 | 2 | 2 | US20130171148 SEQ ID NO: 49 |
| APA56 | 2 | 2 | US20130171148 SEQ ID NO: 51 |
| APA57 | 2 | 2 | US20130171148 SEQ ID NO: 53 |
| APA58 | 2 | 2 | US20130171148 SEQ ID NO: 55 |
| APA59 | 2 | 2 | US20130189271 SEQ ID NO: 1, 85 |
| APA60 | 2 | 2 | US20130189271 SEQ ID NO: 8 |
| APA61 | 2 | 2 | US20130189271 SEQ ID NO: 15 |
| APA62 | 2 | 2 | US20130189271 SEQ ID NO: 22 |
| APA63 | 2 | 2 | US20130189271 SEQ ID NO: 35 |
| APA64 | 2 | 2 | US20130189271 SEQ ID NO: 42 |
| APA65 | 2 | 2 | US20130189271 SEQ ID NO: 49 |
| APA66 | 2 | 2 | US20130189271 SEQ ID NO: 63 |
| APA67 | 2 | 2 | US20130189271 SEQ ID NO: 70 |
| APA68 | 2 | 2 | US20130189271 SEQ ID NO: 77, 79 |
| APA69 | 2 | 2 | US20130189271 SEQ ID NO: 81 |
| APA70 | 2 | 2 | US20130189271 SEQ ID NO: 83 |
| APA71 | 2 | 2 | US20130189271 SEQ ID NO: 87 |
| APA72 | 2 | 2 | US20130189271 SEQ ID NO: 89 |
| APA73 | 2 | 2 | US20130189271 SEQ ID NO: 91 |
| APA74 | 2 | 2 | US20130189271 SEQ ID NO: 93 |
| APA75 | 2 | 2 | US20130189271 SEQ ID NO: 95 |
| APA76 | 2 | 2 | US20130189271 SEQ ID NO: 97 |
| APA77 | 2 | 2 | US20130189271 SEQ ID NO: 99 |
| APA78 | 2 | 2 | US20130189271 SEQ ID NO: 101 |
| APA79 | 2 | 2 | US20130189271 SEQ ID NO: 103 |
| APA80 | 2 | 2 | US20130189271 SEQ ID NO: 105 |
| APA81 | 2 | 2 | US20130189271 SEQ ID NO: 29, 107 |
| APA82 | 2 | 2 | US20130189271 SEQ ID NO: 56, 109 |
| APA83 | 2 | 2 | US20130189271 SEQ ID NO: 111 |
| APA84 | 2 | 2 | US20130189271 SEQ ID NO: 113 |
| APA85 | 2 | 2 | US20130189271 SEQ ID NO: 115 |
| APA86 | 2 | 2 | US20130189271 SEQ ID NO: 117 |
| APA87 | 2 | 2 | US20130189271 SEQ ID NO: 119 |
| APA88 | 2 | 2 | US20130189271 SEQ ID NO: 121 |
| APA89 | 2 | 2 | US20130189271 SEQ ID NO: 123 |
| APA90 | 2 | 2 | US20130189271 SEQ ID NO: 125 |
| APA91 | 2 | 2 | US20140356366 SEQ ID NO: 114 |
| APA92 | 2 | 2 | US20150322162 SEQ ID NO: 132 |
| APA93 | 2 | 2 | US20150322162 SEQ ID NO: 133 |
| APA94 | 2 | 2 | US20150322162 SEQ ID NO: 134 |
| APA95 | 2 | 2 | US20150322162 SEQ ID NO: 135 |
| APA96 | 2 | 2 | US20150322162 SEQ ID NO: 136 |
| APA97 | 2 | 2 | US20160053011 SEQ ID NO: 8 |
| APA98 | 2 | 2 | US20160053011 SEQ ID NO: 24 |
| APA99 | 2 | 2 | U.S Pat. No. 8,609,095 SEQ ID NO: 2; |
| | | | US20160089435 SEQ ID NO: 38 |
| APA100 | 2 | 2 | U.S Pat. No. 8,609,095 SEQ ID NO: 10 |
| APA101 | 2 | 2 | U.S Pat. No. 8,609,095 SEQ ID NO: 14; |
| | | | US20160089435 SEQ ID NO: 26 |
| APA102 | 2 | 2 | U.S Pat. No. 8,609,095 SEQ ID NO: 18 |
| APA103 | 2 | 2 | U.S Pat. No. 8,609,095 SEQ ID NO: 30 |
| APA104 | 2 | 2 | U.S Pat. No. 8,609,095 SEQ ID NO: 34 |
| APA105 | 2 | 2 | U.S Pat. No. 8,609,095 SEQ ID NO: 38 |
| APA106 | 2 | 2 | US20140356366 SEQ ID NO: 115; |
| | | | US20150104443 SEQ ID NO: 1 |
| APA107 | 1 | 10 | US20130089544 SEQ ID NO: 50 |
| APA108 | 1 | 10 | US20130089544 SEQ ID NO: 51 |
| APA109 | 1 | 10 | US20130089544 SEQ ID NO: 52 |
| APA110 | 1 | 10 | US20130089544 SEQ ID NO: 53 |
| APA111 | 1 | 10 | US20130266564 SEQ ID NO: 9 |
| APA112 | 1 | 10 | US20130266564 SEQ ID NO: 19 |
| APA113 | 1 | 10 | US20130266564 SEQ ID NO: 21 |
| APA114 | 1 | 10 | US20130266564 SEQ ID NO: 22 |
| APA115 | 1 | 10 | US20130266564 SEQ ID NO: 23 |
| APA116 | 1 | 10 | US20130266564 SEQ ID NO: 24 |
| APA117 | 1 | 10 | US20140010814 SEQ ID NO: 17 |
| APA118 | 2 | 10 | U.S Pat. No. 8,609,095 SEQ ID NO: 8; |
| | | | US20160089435 SEQ ID NO: 44 |
| APA119 | 2 | 10 | U.S Pat. No. 8,609,095 SEQ ID NO: 4; |
| | | | US20160089435 SEQ ID NO: 40 |
| APA120 | 2 | 10 | U.S Pat. No. 8,609,095 SEQ ID NO: 12 |
| APA121 | 2 | 10 | U.S Pat. No. 8,609,095 SEQ ID NO: 16; |
| | | | US20160089435 SEQ ID NO: 28 |
| APA122 | 2 | 10 | U.S Pat. No. 8,609,095 SEQ ID NO: 20 |
| APA123 | 2 | 10 | U.S Pat. No. 8,609,095 SEQ ID NO: 28; |
| | | | US20160089435 SEQ ID NO: 36 |
| APA124 | 2 | 10 | U.S Pat. No. 8,609,095 SEQ ID NO: 32 |
| APA125 | 2 | 10 | U.S Pat. No. 8,609,095 SEQ ID NO: 36 |
| APA126 | 2 | 10 | U.S Pat. No. 8,609,095 SEQ ID NO: 40 |
| APA127 | 1 | 11 | US20110129464 SEQ ID NO: 1 |
| APA128 | 1 | 11 | US20130089544 SEQ ID NO: 8 |
| APA129 | 1 | 11 | US20130089544 SEQ ID NO: 12 |
| APA130 | 1 | 11 | US20130089544 SEQ ID NO: 16 |
| APA131 | 1 | 11 | US20130089544 SEQ ID NO: 20 |
| APA132 | 1 | 11 | US20130089544 SEQ ID NO: 24 |
| APA133 | 1 | 11 | US20130089544 SEQ ID NO: 28, 32 |
| APA134 | 1 | 11 | US20130089544 SEQ ID NO: 36 |
| APA135 | 1 | 11 | US20130089544 SEQ ID NO: 40 |
| APA136 | 1 | 11 | US20130089544 SEQ ID NO: 44 |
| APA137 | 1 | 11 | US20130266564 SEQ ID NO: 7 |
| APA138 | 2 | 11 | US20090226455 SEQ ID NO: 1 |
| APA139 | 2 | 11 | US20080226659 SEQ ID NO: 4; |
| | | | US20100136033 SEQ ID NO: 4 |
| APA140 | 2 | 11 | US20080226659 SEQ ID NO: 5; |
| | | | US20100136033 SEQ ID NO: 5 |
| APA141 | 2 | 11 | US20130171148 SEQ ID NO: 5 |
| APA142 | 2 | 11 | US20130171148 SEQ ID NO: 12 |
| APA143 | 2 | 11 | US20130171148 SEQ ID NO: 19 |
| APA144 | 2 | 11 | US20130171148 SEQ ID NO: 26 |
| APA145 | 2 | 11 | US20130171148 SEQ ID NO: 33 |
| APA146 | 2 | 11 | US20130171148 SEQ ID NO: 40 |
| APA147 | 2 | 11 | US20130171148 SEQ ID NO: 44, |
| | | | 52, 54, 56 |
| APA148 | 2 | 11 | US20130171148 SEQ ID NO: 46 |
| APA149 | 2 | 11 | US20130171148 SEQ ID NO: 48, 50 |
| APA150 | 2 | 11 | US20130189271 SEQ ID NO: 5, |
| | | | 86, 88 |
| APA151 | 2 | 11 | US20130189271 SEQ ID NO: 12 |
| APA152 | 2 | 11 | US20130189271 SEQ ID NO: 19 |
| APA153 | 2 | 11 | US20130189271 SEQ ID NO: 26, 94 |
| APA154 | 2 | 11 | US20130189271 SEQ ID NO: 39 |
| APA155 | 2 | 11 | US20130189271 SEQ ID NO: 46 |
| APA156 | 2 | 11 | US20130189271 SEQ ID NO: 53 |
| APA157 | 2 | 11 | US20130189271 SEQ ID NO: 67 |
| APA158 | 2 | 11 | US20130189271 SEQ ID NO: 74 |
| APA159 | 2 | 11 | US20130189271 SEQ ID NO: 78, |
| | | | 80, 82 |
| APA160 | 2 | 11 | US20130189271 SEQ ID NO: 84 |
| APA161 | 2 | 11 | US20130189271 SEQ ID NO: 90 |
| APA162 | 2 | 11 | US20130189271 SEQ ID NO: 92 |
| APA163 | 2 | 11 | US20130189271 SEQ ID NO: 100, 102 |
| APA164 | 2 | 11 | US20130189271 SEQ ID NO: 104 |
| APA165 | 2 | 11 | US20130189271 SEQ ID NO: 106 |
| APA166 | 2 | 11 | US20130189271 SEQ ID NO: 32, 108 |
| APA167 | 2 | 11 | US20130189271 SEQ ID NO: 60, |
| | | | 110, 112 |
| APA168 | 2 | 11 | US20130189271 SEQ ID NO: 114 |
| APA169 | 2 | 11 | US20130189271 SEQ ID NO: 116 |
| APA170 | 2 | 11 | US20130189271 SEQ ID NO: 96, |
| | | | 98, 118 |
| APA171 | 2 | 11 | US20130189271 SEQ ID NO: 120 |
| APA172 | 2 | 11 | US20130189271 SEQ ID NO: 122, 126 |
| APA173 | 2 | 11 | US20130189271 SEQ ID NO: 124 |
| APA174 | 2 | 11 | US20140356366 SEQ ID NO: 117 |
| APA175 | 2 | 11 | US20150322162 SEQ ID NO: 137 |
| APA176 | 2 | 11 | US20150322162 SEQ ID NO: 138 |
| APA177 | 2 | 11 | US20150322162 SEQ ID NO: 139 |
| APA178 | 2 | 11 | US20150322162 SEQ ID NO: 140 |
| APA179 | 2 | 11 | US20150322162 SEQ ID NO: 141 |
| APA180 | 2 | 11 | US20160053011 SEQ ID NO: 10 |
| APA181 | 2 | 11 | US20160053011 SEQ ID NO: 26 |
| APA182 | 2 | 11 | US20160053011 SEQ ID NO: 247 |
| APA183 | 2 | 11 | US20160053011 SEQ ID NO: 249 |
| APA184 | 2 | 11 | US20160053011 SEQ ID NO: 251 |
| APA185 | 2 | 17 | US20100136033 SEQ ID NO: 6 |
| APA186 | 1 | 1 | US20100158926 SEQ ID NO: 2 |
| APA187 | 1 | 1 | US20100158926 SEQ ID NO: 6 |
| APA188 | 1 | 1 | US20100158926 SEQ ID NO: 10 |
| APA189 | 1 | 1 | US20100158926 SEQ ID NO: 14 |
| APA190 | 1 | 1 | US20100158926 SEQ ID NO: 26 |
| APA191 | 1 | 1 | US20100158926 SEQ ID NO: 30 |
| APA192 | 1 | 1 | US20100158926 SEQ ID NO: 42 |
| APA193 | 2 | 1 | U.S Pat. No. 9,562,110 SEQ ID NO: 3 |
| APA194 | 4 | 1 | U.S Pat. No. 8,907,069B2 SEQ ID NO: 7 |
| APA195 | 4 | 1 | U.S Pat. No. 8,907,069B2 SEQ ID NO: 8 |
| APA196 | 2 | 2 | U.S Pat. No. 9,150,663B2 SEQ ID NO: 16 |
| APA197 | 2 | 2 | U.S Pat. No. 9,150,663B2 SEQ ID NO: 18 |
| APA198 | 2 | 2 | U.S Pat. No. 9,150,663B2 SEQ ID NO: 20 |
| APA199 | 2 | 2 | U.S Pat. No. 9,150,663B2 SEQ ID NO: 22 |
| APA200 | 2 | 2 | U.S Pat. No. 9,155,802B2 SEQ ID NO: 26 |
| APA201 | 2 | 2 | U.S Pat. No. 9,527,913B2 SEQ ID NO: 6, 67 |
| APA202 | 2 | 2 | U.S Pat. No. 9,527,913B2 SEQ ID NO: 23 |
| APA203 | 2 | 2 | U.S Pat. No. 9,155,802B2 SEQ ID NO: 34 |
| APA204 | 2 | 2 | U.S Pat. No. 9,527,913B2 SEQ ID NO: 8, 69 |
| APA205 | 2 | 2 | U.S Pat. No. 9,527,913B2 SEQ ID NO: 27 |
| APA206 | 2 | 2 | U.S Pat. No. 9,155,802B2 SEQ ID NO: 42 |
| APA207 | 2 | 2 | U.S Pat. No. 9,527,913B2 SEQ ID NO: 48 |
| APA208 | 2 | 2 | U.S Pat. No. 9,527,913B2 SEQ ID NO: 52 |
| APA209 | 2 | 2 | U.S Pat. No. 9,527,913B2 SEQ ID NO: 50 |
| APA210 | 2 | 2 | US20130017598 SEQ ID NO: 17; |
| | | | US20110091372 SEQ ID NO: 98 |
| APA211 | 2 | 2 | US20130017598 SEQ ID NO: 19 |
| APA212 | 2 | 2 | US20130017598 SEQ ID NO: 25 |
| APA213 | 3 | 2 | U.S Pat. No. 9,150,663B2 SEQ ID NO: 26 |
| APA214 | 3 | 2 | U.S Pat. No. 9,150,663B2 SEQ ID NO: 24 |
| APA215 | 2 | 10 | U.S Pat. No. 9,155,802B2 SEQ ID NO: 28 |
| APA216 | 2 | 10 | U.S Pat. No. 9,527,913B2 SEQ ID NO: 25 |
| APA217 | 2 | 10 | U.S Pat. No. 9,155,802B2 SEQ ID NO: 36 |
| APA218 | 2 | 10 | U.S Pat. No. 9,527,913B2 SEQ ID NO: 29 |
| APA219 | 2 | 10 | U.S Pat. No. 9,155,802B2 SEQ ID NO: 44 |
| APA220 | 4 | 10 | U.S Pat. No. 8,907,069B2 SEQ ID NO: 9 |
| APA221 | 2 | 11 | U.S Pat. No. 9,150,663B2 SEQ ID NO: 17 |
| APA222 | 2 | 11 | U.S Pat. No. 9,150,663B2 SEQ ID NO: 19 |
| APA223 | 2 | 11 | U.S Pat. No. 9,150,663B2 SEQ ID NO: 21 |
| APA224 | 2 | 11 | U.S Pat. No. 9,150,663B2 SEQ ID NO: 23 |
| APA225 | 2 | 11 | U.S Pat. No. 9,527,913B2 SEQ ID NO: 7, 68 |
| APA226 | 2 | 11 | U.S Pat. No. 9,527,913B2 SEQ ID NO: 9, 70 |
| APA227 | 2 | 11 | U.S Pat. No. 9,527,913B2 SEQ ID NO: 49 |
| APA228 | 2 | 11 | U.S Pat. No. 9,527,913B2 SEQ ID NO: 53 |
| APA229 | 2 | 11 | U.S Pat. No. 9,527,913B2 SEQ ID NO: 51 |
| APA230 | 2 | 11 | US20130017598 SEQ ID NO: 16 |
| APA231 | 2 | 11 | US20130017598 SEQ ID NO: 18 |
| APA232 | 2 | 11 | US20130017598 SEQ ID NO: 24 |
| APA233 | 3 | 11 | U.S Pat. No. 915,066,3B2 SEQ ID NO: 27 |
| APA234 | 3 | 11 | U.S Pat. No. 915,066,3B2 SEQ ID NO: 25 |
| APA235 | 2 | 18 | WO2013156054; SEQ ID NO: 3 |
| APA236 | 5 | | US20140072582 SEQ ID NO: 34 |

[1217] In Table 28, the target number (Target No.) code is described in the following semi-colon delimited list where the target number is followed by the target (e.g., Target No. 1 with target ERBB2 is shown as Target No. 1-Target ERBB2). The targets represented by the codes in Table 28 include, but are not limited to, Target No. 1-Target ERBB2; Target No. 2-Target HER2; Target No. 3-Target HER2/CD3; Target No. 4-Target HER2/Dig; and Target No. 5-Target HER2/neu.

[1218] In Table 28, the description number (Description No.) code is described in the following semi-colon delimited list where the description number is followed by the description (e.g., Description No. 1 with description heavy chain is shown as Description No. 1-Description Heavy chain). The targets represented by the codes in Table 28 include, but are not limited to, Description No. 1-Description Heavy chain; Description No. 2-Description Heavy Chain—variable region; Description No. 3-Description Heavy chain 1; Description No. 4-Description Heavy chain constant, human IgG; Description No. 5-Description Heavy chain variable region-CDR1; Description No. 6-Description Heavy chain variable region-CDR2; Description No. 7-Description Heavy chain variable region-CDR3; Description No. 8-Description Herceptin Heavy chain variable region-CH1 (Heavy chain variable region(1-120)+CH1(121-218)); Description No. 9-Description H-GAMMA-1 (Heavy chain variable region(1-120)+CH1(121-218)+HINGE-REGION(219-233)+CH2(234-343)+CH3(344-450); Description No. 10-Description Light chain; Description No. 11-Description Light Chain—variable region; Description No. 12-Description Light chain (L-KAPPA (V-KAPPA(1-107)+C-KAPPA(108-214)); Description No. 13-Description Light chain 1, Anti-HER2; Description No. 14-Description Light chain variable region-CDR1 From U.S. Pat. No. 8,557,243; Description No. 15-Description Light chain variable region-CDR2 From U.S. Pat. No. 8,557,243; Description No. 16-Description Light chain variable region-CDR3 From U.S. Pat. No. 8,557,243; Description No. 17-Description Light chain, human subgroup; and Description No. 18-Description ScFv.

### AAV Particle Production

[1219] In some embodiments, disclosed herein is a method of making a genetic element. The method comprising providing a nucleic acid encoding a genetic element described herein and a backbone region suitable for replication of the genetic element in a cell, e.g., a bacterial cell (e.g., wherein the backbone region comprises one or both of a bacterial origin of replication and a selectable marker), and excising the genetic element from the backbone region, e.g., by cleaving the nucleic acid molecule at upstream and downstream of the genetic element. In some embodiments, the genetic element comprising a nucleic acid comprising a transgene encoding an antibody molecule (e.g., an antibody molecule that binds to HER2), will be incorporated into an AAV particle produced in a cell.

[1220] In some embodiments, disclosed herein is a method of making a recombinant AAV particle of the present disclosure, the method comprising (i) providing a host cell comprising a genetic element described herein and incubating the host cell under conditions suitable to enclose the genetic element in an AAV capsid polypeptide, e.g., an AAV capsid variant, e.g., a capsid polypeptide described herein (e.g., a capsid protein listed in Table 1 or 3-5), thereby making the recombinant AAV particle. In some embodiments, the method comprises prior to step (i), introducing a first nucleic acid comprising the genetic element into a cell. In some embodiments, the host cell comprises a second nucleic acid encoding the capsid protein. In some embodiments, the second nucleic acid is introduced into the host cell prior to, concurrently with, or after the first nucleic acid molecule.

[1221] Methods of making AAV particles are also described in e.g., U.S. Pat. Nos. 6,204,059, 5,756,283, 6,258,595, 6,261,551, 6,270,996, 6,281,010, 6,365,394, 6,475,769, 6,482,634, 6,485,966, 6,943,019, 6,953,690, 7,022,519, 7,238,526, 7,291,498 and 7,491,508, 5,064,764, 6,194,191, 6,566,118, 8,137,948; or International Publication Nos. WO1996039530, WO1998010088, WO1999014354, WO1999015685, WO1999047691, WO2000055342, WO2000075353, and WO2001023597; Methods In Molecular Biology, ed. Richard, Humana Press, NJ (1995); O'Reilly et al., Baculovirus Expression Vectors, A Laboratory Manual, Oxford Univ. Press (1994); Samulski et al., J. Vir. 63:3822-8 (1989); Kajigaya et al., Proc. Nat'l. Acad. Sci. USA 88: 4646-50 (1991); Ruffing et al., J. Vir. 66:6922-30 (1992); Kimbauer et al., Vir., 219:37-44 (1996); Zhao et al., Vir. 272:382-93 (2000); the contents of each of which are herein incorporated by reference in their entirety. In some embodiments, the AAV particles are made using the methods described in WO2015191508, the contents of which are herein incorporated by reference in their entirety.

[1222] In some embodiments, cells commonly used for production of a recombinant AAV particle include but are not limited to 293 cells, COS cells, HeLa cells, KB cells, and other mammalian cell lines as described in U.S. Pat. Nos. 6,156,303, 5,387,484, 5,741,683, 5,691,176, and 5,688,676; U.S. patent publication No. 2002/0081721, and International Patent Publication Nos. WO 00/47757, WO 00/24916, and WO 96/17947, the contents of each of which are herein incorporated by reference in their entireties. In some embodiments, the AAV particles of the present disclosure may be produced in insect cells (e.g., Sf9 cells). In some embodiments, the AAV particles of the present disclosure may be produced in mammalian cells.

[1223] In some embodiments, the AAV particles of the present disclosure may be produced using triple transfection. In some embodiments, the AAV particles of the present disclosure may be produced by triple transfection in mammalian cells. In some embodiments, the AAV particles of the present disclosure may be produced by triple transfection in HEK293 cells.

[1224] The present disclosure provides a method for producing an AAV particle comprising the steps of: 1) co-transfecting competent bacterial cells with a bacmid vector and either a viral construct vector and/or AAV payload construct vector, e.g., a vector comprising a genetic element described herein, 2) isolating the resultant viral construct expression vector and AAV payload construct expression vector and separately transfecting viral replication cells, 3) isolating and purifying resultant payload and viral construct particles comprising viral construct expression vector or AAV payload construct expression vector, 4) co-infecting a viral replication cell with both the AAV payload and viral construct particles comprising viral construct expression vector or AAV payload construct expression vector, 5) harvesting and purifying the viral particle comprising a genetic element.

[1225] In some embodiments, the present disclosure provides a method for producing an AAV particle comprising the steps of 1) simultaneously co-transfecting mammalian cells, such as, but not limited to HEK293 cells, with a genetic element encoding an antibody molecule, a construct expressing rep and cap genes and a helper construct, 2) harvesting and purifying the AAV particle comprising the genetic element.

[1226] In some embodiments, the viral construct vector(s) used for AAV production may contain a nucleotide sequence encoding the AAV capsid proteins where the initiation codon of the AAV VP1 capsid protein is a non-ATG, e.g., a suboptimal initiation codon, allowing the expression of a modified ratio of the viral capsid proteins in the production system, to provide improved infectivity of the host cell. In a non-limiting example, a viral construct vector may contain a nucleic acid construct comprising a nucleotide sequence encoding AAV VP1, VP2, and VP3 capsid proteins, wherein the initiation codon for translation of the AAV VP1 capsid protein is CTG, TTG, or GTG, as described in U.S. Pat. No. 8,163,543, the contents of which are herein incorporated by reference in its entirety.

[1227] In some embodiments, the viral construct vector(s) used for AAV production may contain a nucleotide sequence encoding the AAV rep proteins where the initiation codon of the AAV rep protein or proteins is a non-ATG. In some embodiments, a single coding sequence is used for the Rep78 and Rep52 proteins, wherein initiation codon for translation of the Rep78 protein is a suboptimal initiation codon, selected from the group consisting of ACG, TTG, CTG, and GTG, that effects partial exon skipping upon expression in insect cells, as described in U.S. Pat. No. 8,512,981, the contents of which is herein incorporated by reference in its entirety, for example to promote less abundant expression of Rep78 as compared to Rep52, which may be advantageous in that it promotes high vector yields.

[1228] In some embodiments, the genetic element of the AAV particle optionally encodes a selectable marker. The selectable marker may comprise a cell-surface marker, such as any protein expressed on the surface of the cell including, but not limited to receptors, CD markers, lectins, integrins, or truncated versions thereof.

[1229] In some embodiments, selectable marker reporter genes are selected from those described in International Application No. WO 96/23810; Heim et al., Current Biology 2:178-182 (1996); Heim et al., Proc. Natl. Acad. Sci. USA (1995); or Heim et al., Science 373:663-664 (1995); WO 96/30540, the contents of each of which are incorporated herein by reference in their entireties).

[1230] The genetic elements encoding an anti-HER2 antibody molecule payload described herein may be useful in the fields of human disease, veterinary applications and a variety of in vivo and in vitro settings. The AAV particles of the present disclosure may be useful in the field of medicine for the treatment, prophylaxis, palliation or amelioration of diseases and/or disorders caused by HER2 over-expression. In some embodiments, the AAV particles are used for the prevention and/or treatment of a disease and/or disorder associated with over-expression of HER2. In some embodiments, the disease and/or disorder associated with HER2 over-expression includes, but is not limited to tumors, cancers, neoplastic tissue, pre-malignant and non-neoplastic or non-malignant hyperproliferative disorders. In some embodiments, the disease associated with HER2 over-expression is cancer. In some embodiments, the cancer is metastatic breast cancer (e.g., brain metastases).

[1231] The present disclosure also provides in some embodiments, a pharmaceutical composition comprising an AAV particle described herein, e.g., an AAV particle comprising a genetic element encoding an anti-HER2 antibody molecule, and a pharmaceutically acceptable excipient. The present disclosure also provides in some embodiments, a method of treating a subject in need thereof comprising administering to the subject a therapeutically effective amount of the pharmaceutical composition described herein.

[1232] In some embodiments, the pharmaceutical composition is administered to a subject intravenously, intracerebroventricularly, via intraparenchymal administration, intrathecally, via subpial administration, intramuscularly, or a combination thereof. Certain embodiments of the method provide that the subject is treated for a disease and/or disorder associated with over expression of HER2. In one aspect of the method, a symptom, e.g., a pathological feature, of the neurological disorder and/or a disease associated with over expression of HER2 is reduced, alleviated, and/or the progression of the disease and/or disorder associated with over expression of HER2 is halted, slowed, ameliorated, or reversed.

[1233] Also described herein are compositions, methods, processes, kits and devices for the design, preparation, manufacture and/or formulation of an AAV particle, e.g., an AAV particle described herein for the vectorized delivery of an antibody molecule. In some embodiments, a payload, such as but not limited to anti-HER2 antibody molecule, may be encoded by a nucleic acid comprising or contained within plasmids or vectors or recombinant adeno-associated viruses (AAVs).

[1234] The present disclosure also provides administration and/or delivery methods for encoded payloads (e.g., antibody molecules), genetic elements, AAV vectors, and viral particles, e.g., AAV particles, for the treatment and/or amelioration of diseases and/or disorders associated with over expression of HER2 (e.g., cancer).

### Cells

[1235] In some embodiments, disclosed herein is a cell comprising a genetic element and/or an AAV vector of the present disclosure.

[1236] Viral production disclosed herein describes processes and methods for producing an AAV particle that contacts a cell to deliver a payload, e.g. a genetic element comprising a transgene encoding a payload, e.g., an antibody molecule described herein.

[1237] In some embodiments, an AAV particle described herein may be produced in a cell, e.g., a viral replication cell, that comprises an insect cell.

[1238] Growing conditions for insect cells in culture, and production of heterologous products in insect cells in culture are well-known in the art, see U.S. Pat. No. 6,204,059, the contents of which are herein incorporated by reference in their entirety.

[1239] Any insect cell which allows for replication of parvovirus and which can be maintained in culture can be used in accordance with the present disclosure. Cell lines may be used from Spodoptera frugiperda, including, but not limited to the Sf9 or Sf21 cell lines, Drosophila cell lines, or mosquito cell lines, such as Aedes albopictus derived cell lines. Use of insect cells for expression of heterologous proteins is well documented, as are methods of introducing nucleic acids, such as vectors, e.g., insect-cell compatible vectors, into such cells and methods of maintaining such cells in culture. See, for example, Methods in Molecular Biology, ed. Richard, Humana Press, NJ (1995); O'Reilly et al., Baculovirus Expression Vectors, A Laboratory Manual, Oxford Univ. Press (1994); Samulski et al., J. Vir. 63:3822-8 (1989); Kajigaya et al., Proc. Nat'l. Acad. Sci. USA 88: 4646-50 (1991); Ruffing et al., J. Vir. 66:6922-30 (1992); Kimbauer et al., Vir. 219:37-44 (1996); Zhao et al., Vir. 272:382-93 (2000); and Samulski et al., U.S. Pat. No. 6,204,059, the contents of each of which is herein incorporated by reference in its entirety. The cell, e.g., viral replication cell, may be selected from any biological organism, including a prokaryotic (e.g., bacterial) cell, and a eukaryotic cell, including for example, insect cells, yeast cells and mammalian cells. Viral replication cells may comprise mammalian cells such as A549, WEH1, 3T3, 10T1/2, BHK, MDCK, COS 1, COS 7, BSC 1, BSC 40, BMT 10, VERO. W138, HeLa, HEK293, Saos, C2C12, L cells, HT1080, HepG2 and primary fibroblast, hepatocyte and myoblast cells derived from mammals. In some embodiments, a viral replication cell comprises a cell derived from a mammalian species including, but not limited to, a human, a monkey, a mouse, a rat, a rabbit, and a hamster or a cell type, including but not limited to a fibroblast, a hepatocyte, a tumor cell, a cell line transformed cell, etc.

### Production of AAV Particles

[1240] In some embodiments, production of an AAV particle disclosed herein describes processes and methods for producing an AAV particle that contacts a cell, e.g., a target cell, to deliver a payload, e.g. an antibody molecule and/or a genetic element comprising a nucleotide sequence comprising a transgene encoding a payload, e.g., an antibody molecule.

[1241] In some embodiments, an AAV particle of the present disclosure may be produced in a cell, e.g., a viral replication cell that comprises a mammalian cell.

[1242] In some embodiments, a viral replication cell for production of a recombinant AAV particle described herein includes, but is not limited to 293 cells, COS cells. HeLa cells, KB cells, and other mammalian cell lines as described in U.S. Pat. Nos. 6,156,303, 5,387,484, 5,741,683, 5,691,176, and 5,688,676; U.S. patent application 2002/0081721, and International Patent Applications WO 00/47757, WO 00/24916, and WO 96/17947, the contents of each of which are herein incorporated by reference in their entireties.

[1243] In some embodiments, an AAV particle is produced in a mammalian-cell wherein all three VP proteins are expressed at a stoichiometry approaching 1:1:10 (VP1:VP2:VP3). In some embodiments, the regulatory mechanisms that allow this controlled level of expression include the production of two mRNAs, one for VP1, and the other for VP2 and VP3, produced by differential splicing.

[1244] In other embodiments, an AAV particles is produced in a mammalian cell using a triple transfection method wherein a genetic element comprising a nucleotide sequence comprising a transgene encoding a payload (e.g., an antibody molecule described herein), parvoviral Rep and parvoviral Cap and a helper construct are comprised within three different constructs. In some embodiments, the triple transfection method of the three components of AAV particle production is utilized to produce small lots of virus for assays including transduction efficiency, target tissue (tropism) evaluation, and stability.

### Baculovirus

[1245] In some embodiments, the production of an AAV particle disclosed herein comprises processes and methods for producing an AAV particle that contacts a cell, e.g., a target cell, to deliver a genetic element which comprises a nucleotide sequence comprising a transgene encoding a payload (e.g., a an antibody molecule described herein).

[1246] Briefly, a viral construct vector (e.g., encoding the structural, non-structural, components of the particle) and a genetic element each incorporated by a transposon donor/acceptor system into a bacmid, also known as a baculovirus plasmid, by standard molecular biology techniques known and performed by a person skilled in the art. Transfection of a separate cell, e.g., a viral replication cell, or population of cells produces two baculoviruses, one that comprises the viral construct expression vector, and another that comprises the genetic element. The two baculoviruses may be used to infect a single viral replication cell population for production of AAV particles.

[1247] In some embodiments, a baculovirus expression vector for producing viral particles in an insect cell, including but not limited to a Spodoptera frugiperda (Sf9) cell, provides high titers of viral particle product, e.g., an AAV particle described herein. In some embodiments, a recombinant baculovirus encoding the viral construct expression vector and genetic element encoding a payload initiates an infection, e.g., a productive infection of a cell, e.g., a viral replicating cell, or population of cells. In some embodiments, an infectious baculovirus particle released from the primary infection secondarily infect at an additional cell or plurality of cells in the culture, exponentially infecting the entire cell culture population in a number of infection cycles that is a function of the initial administration of infection, see Urabe, M. et al., J Virol. 2006 February; 80 (4):1874-85, the contents of which are herein incorporated by reference in their entirety.

[1248] In some embodiments, the production system utilizes a titerless infected-cells preservation and scale-up system. Small scale seed cultures of cells, e.g., viral producing cells are transfected with viral expression constructs encoding the structural, non-structural, components of the viral particle, e.g., an AAV particle described herein. Baculovirus-infected viral producing cells are harvested into aliquots that may be cryopreserved in liquid nitrogen; the aliquots retain viability and infectivity for infection of large scale viral producing cell culture Wasilko D J et al., Protein Expr Purif. 2009 June; 65(2):122-32, the contents of which are herein incorporated by reference in their entirety.

[1249] In some embodiments, a genetically stable baculovirus may be used as a source of the one or more of the components for producing an AAV particle of the present disclosure in invertebrate cells. In some embodiments, a defective baculovirus expression vector may be maintained episomally in insect cells. Tn some embodiments, the bacmid vector is engineered with replication control elements, including but not limited to promoters, enhancers, and/or cell-cycle regulated replication elements.

[1250] In some embodiments, a baculoviruses may be engineered with a (non-) selectable marker for recombination into the chitinase/cathepsin locus. In some embodiments, the chia/v-cath locus is non-essential for propagating baculovirus in tissue culture, and the V-cath (EC 3.4.22.50) is a cysteine endoprotease that is most active on Arg-Arg dipeptide containing substrates. In some embodiments, the Arg-Arg dipeptide is present in densovirus and parvovirus capsid structural proteins but infrequently occurs in dependovirus VP1.

[1251] In some embodiments, stable cells, e.g., viral replication cells, permissive for baculovirus infection are engineered with at least one stable integrated copy of any of the elements necessary for AAV replication and particle production including, but not limited to, the entire AAV genome, Rep and Cap genes, Rep genes, Cap genes, each Rep protein as a separate transcription cassette, each VP protein as a separate transcription cassette, the AAP (assembly activation protein), or at least one of the baculovirus helper genes with native or non-native promoters.

[1252] In some embodiments, any of the genetic elements, e.g., any of BA_ITR1-BA_ITR9, e.g., as described in Tables 6, 17-19, 23-26, 40, 42, 43, 68, and 69, is introduced into a bacmid. The bacmid may further comprise replication and transcription control elements, including but not limited to promoters, enhancers, and/or cell-cycle regulated replication elements, as well as antibiotic or other selection markers to permit cloning and/or maintenance of infectious baculovirus DNA in a suitable bacterial host, such as E. coli.

[1253] In some embodiments, AAV particle production may be modified to increase the scale of production. Large scale viral production methods according to the present disclosure may include any of those taught in U.S. Pat. Nos. 5,756,283, 6,258,595, 6,261,551, 6,270,996, 6,281,010, 6,365,394, 6,475,769, 6,482,634, 6,485,966, 6,943,019, 6,953,690, 7,022,519, 7,238,526, 7,291,498 and 7,491,508 or International Publication Nos. WO1996039530, WO1998010088, WO1999014354, WO1999015685, WO1999047691, WO2000055342, WO2000075353 and WO2001023597, the contents of each of which are herein incorporated by reference in their entirety. Methods of increasing viral particle, e.g., AAV particle, production scale typically comprise increasing the number of viral replication cells. In some embodiments, a viral replication cell comprises an adherent cell. To increase the scale of viral particle production by adherent viral replication cells, larger cell culture surfaces are required. In some cases, large-scale production methods comprise the use of roller bottles to increase cell culture surfaces. Other cell culture substrates with increased surface areas are known in the art. Examples of additional adherent cell culture products with increased surface areas include, but are not limited to CELLSTACK®, CELLCUBE® (Corning Corp., Corning, NY) and NUNC™ CELL FACTORY™ (Thermo Scientific, Waltham, MA.) In some cases, large-scale adherent cell surfaces may comprise from about 1,000 cm² to about 100,000 cm². In some cases, large-scale adherent cell cultures may comprise from about 10⁷ to about 10⁹ cells, from about 10⁸ to about 10¹⁰ cells, from about 10⁹ to about 10¹² cells or at least 10¹² cells. In some cases, large-scale adherent cultures may produce from about 10 to about 10¹², from about 10¹⁰ to about 10¹³, from about 10¹¹ to about 10¹⁴, from about 10¹² to about 10¹⁵ or at least 10¹⁵ viral particles.

[1254] In some embodiments, large-scale viral production methods of the present disclosure may comprise the use of suspension cell cultures. Suspension cell culture allows for significantly increased numbers of cells. Typically, the number of adherent cells that can be grown on about 10-50 cm² of surface area can be grown in about 1 cm³ volume in suspension.

[1255] Transfection of replication cells in large-scale culture formats may be carried out according to any methods known in the art. For large-scale adherent cell cultures, transfection methods may include, but are not limited to the use of inorganic compounds (e.g. calcium phosphate), organic compounds [e.g. polyethylencimine (PEI)] or the use of non-chemical methods (e.g. electroporation.) With cells grown in suspension, transfection methods may include, but are not limited to the use of calcium phosphate and the use of PEI. In some cases, transfection of large scale suspension cultures may be carried out according to the section entitled “Transfection Procedure” described in Feng, L. et al., 2008. Biotechnol Appl. Biochem. 50:121-32, the contents of which are herein incorporated by reference in their entirety. In some embodiments, PEI-DNA complexes may be formed for introduction of plasmids to be transfected. In some embodiments, a cell being transfected with PEI-DNA complexes may be ‘shocked’ prior to transfection, which comprises lowering cell culture temperatures to 4° C. for a period of about 1 hour. In some embodiments, a cell culture may be shocked for a period of from about 10 minutes to about 5 hours. In some embodiments, a cell culture may be shocked at a temperature of from about 0° C. to about 20° C.

[1256] In some embodiments, a transfection may include a vector for expression of an RNA effector molecule to reduce expression of nucleic acids from a genetic element and/or AAV vector. In some embodiments, such a method may enhance the production of viral particles by reducing cellular resources wasted on expressing a genetic element encoding a payload. In some embodiments, such a method may be carried according to those taught in US Publication No. US2014/0099666, the contents of which are herein incorporated by reference in their entirety.

### III. FORMULATION AND DELIVERY

### Pharmaceutical Compositions

[1257] According to the present disclosure, the AAV particle described herein may be prepared as a pharmaceutical composition. In some embodiments, the pharmaceutical composition comprises at least one active ingredients. In some embodiments, the pharmaceutical composition comprises a pharmaceutically acceptable excipient.

[1258] In some embodiments, the relative amount of the active ingredient (e.g. AAV particle), a pharmaceutically acceptable excipient, and/or any additional ingredients in a pharmaceutical composition in accordance with the present disclosure may vary, depending upon the identity, size, and/or condition of the subject being treated and further depending upon the route by which the composition is to be administered. For example, the composition may comprise between 0.1% and 99% (w/w) of the active ingredient. By way of example, the composition may comprise between 0.1% and 100%, e.g., between 0.5 and 50%, between 1-30%, between 5-80%, at least 80% (w/w) active ingredient.

[1259] In some embodiments, the pharmaceutical composition comprising an AAV particle described herein may comprise a genetic element encoding a payload, e.g., an antibody molecule. As a non-limiting example, the pharmaceutical composition may contain an AAV particle with at least 1, 2, 3, 4, 5, or more genetic elements encoding an antibody molecule. In some embodiments, the pharmaceutical composition comprises a nucleic acid encoding a transgene encoding a payload comprising an antibody molecule.

[1260] The present disclosure also provides in some embodiments, a pharmaceutical composition suitable for administration to a human and/or any other animal, e.g., to non-human animals, e.g. non-human mammals. The present disclosure also provides modification of a pharmaceutical composition suitable for administration to a human such that it is also suitable for administration to various animals. In some embodiments, a subject to which administration of the pharmaceutical compositions is contemplated include, but are not limited to, a human or a non-human primate; and/or a mammal, including cattle, pigs, horses, sheep, cats, dogs, mice, rats, birds, e.g., such as poultry, chickens, ducks, geese, and/or turkeys.

[1261] In some embodiments, the pharmaceutical composition described herein is administered to a human, e.g., a human patient, or a human subject.

### Formulations

[1262] In some embodiments, the AAV particle can be formulated using an excipient to: (1) increase stability; (2) increase cell transfection or transduction; (3) permit the sustained or delayed expression of the payload; (4) alter the biodistribution (e.g., target the viral particle to specific tissues or cell types); (5) increase the translation of encoded protein; (6) alter the release profile of encoded protein; and/or (7) allow for regulatable expression of the payload.

[1263] Formulations of the present disclosure can include, without limitation, saline, liposomes, lipid nanoparticles, polymers, peptides, proteins, cells transfected with viral vectors (e.g., for transfer or transplantation into a subject) and combinations thereof.

[1264] Formulations of the pharmaceutical compositions described herein may be prepared by any method known or hereafter developed in the art of pharmacology. In some embodiments, a pharmaceutical composition comprises an AAV particle described herein and at least one active ingredient and optionally a pharmaceutically acceptable excipient.

[1265] In general, such preparatory methods include the step of associating the active ingredient with an excipient and/or one or more other accessory ingredients. In some embodiments, an active ingredient can comprise an AAV particle carrying a payload region encoding the polypeptides or to the antibody or antibody-based composition encoded by a genetic element of by an AAV particle as described herein.

[1266] A pharmaceutical composition in accordance with the present disclosure may be prepared, packaged, and/or sold in bulk, as a single unit dose, and/or as a plurality of single unit doses. In some embodiments, a unit dose is a discrete amount of the pharmaceutical composition comprising a predetermined amount of the active ingredient. In some embodiments, the amount of the active ingredient is generally equal to the dosage of the active ingredient which would be administered to a subject and/or a convenient fraction of such a dosage such as, for example, one-half or one-third of such a dosage.

[1267] In some embodiments, an AAV particle may be formulated in phosphate buffered saline (PBS), in combination with an ethylene oxide/propylene oxide copolymer (also known as Pluronic or poloxamer). In some embodiments, an AAV particle may be formulated in PBS with 0.001% Pluronic acid (F-68) (poloxamer 188) at a pH of about 7.0. In some embodiments, an AAV particle may be formulated in PBS with 0.001% Pluronic acid (F-68) (poloxamer 188) at a pH of about 7.3. In some embodiments, an AAV particle may be formulated in PBS with 0.001% Pluronic acid (F-68) (poloxamer 188) at a pH of about 7.4. In some embodiments, an AAV particle may be formulated in a solution comprising sodium chloride, sodium phosphate and an ethylene oxide/propylene oxide copolymer. In some embodiments, an AAV particle may be formulated in a solution comprising sodium chloride, sodium phosphate dibasic, sodium phosphate monobasic and poloxamer 188/Pluronic acid (F-68).

[1268] In some embodiments, an AAV particle may be formulated in a solution comprising about 180 mM sodium chloride, about 10 mM sodium phosphate and about 0.001% poloxamer 188. In some embodiments, this formulation may be at a pH of about 7.3. In some embodiments, the concentration of sodium chloride in the final solution may be 150 mM-200 mM. As non-limiting examples, the concentration of sodium chloride in the final solution may be 150 mM, 160 mM, 170 mM, 180 mM, 190 mM or 200 mM. The concentration of sodium phosphate in the final solution may be 1 mM-50 mM. As non-limiting examples, the concentration of sodium phosphate in the final solution may be 1 mM, 2 mM, 3 mM, 4 mM, 5 mM, 6 mM, 7 mM, 8 mM, 9 mM, 10 mM, 15 mM, 20 mM, 25 mM, 30 mM, 40 mM, or 50 mM. In some embodiments, the concentration of poloxamer 188 (Pluronic acid (F-68)) may be 0.0001%-1%. As non-limiting examples, the concentration of poloxamer 188 (Pluronic acid (F-68)) may be 0.0001%, 0.0005%, 0.001%, 0.005%, 0.01%, 0.05%, 0.1%, 0.5%, or 1%. The final solution may have a pH of 6.8-7.7. Non-limiting examples for the pH of the final solution include a pH of 6.8, 6.9, 7.0, 7.1, 7.2, 7.3, 7.4, 7.5, 7.6, or 7.7.

[1269] In some embodiments, an AAV particle described herein may be formulated in a solution comprising about 1.05% sodium chloride, about 0.212% sodium phosphate dibasic, heptahydrate, about 0.025% sodium phosphate monobasic, monohydrate, and 0.001% poloxamer 188, at a pH of about 7.4. As a non-limiting example, the concentration of AAV particle in this formulated solution may be about 0.001%. The concentration of sodium chloride in the final solution may be 0.1-2.0%, with non-limiting examples of 0.1%, 0.25%, 0.5%, 0.75%, 0.95%, 0.96%, 0.97%, 0.98%, 0.99%, 1.00%, 1.01%, 1.02%, 1.03%, 1.04%, 1.05%, 1.06%, 1.07%, 1.08%, 1.09%, 1.10%, 1.25%, 1.5%, 1.75%, or 2%. In some embodiments, the concentration of sodium phosphate dibasic in the final solution may be 0.100-0.300% with non-limiting examples including 0.100%, 0.125%, 0.150%, 0.175%, 0.200%, 0.210%, 0.211%, 0.212%, 0.213%, 0.214%, 0.215%, 0.225%, 0.250%, 0.275%, 0.300%. The concentration of sodium phosphate monobasic in the final solution may be 0.010-0.050%, with non-limiting examples of 0.010%, 0.015%, 0.020%, 0.021%, 0.022%, 0.023%, 0.024%, 0.025%, 0.026%, 0.027%, 0.028%, 0.029%, 0.030%, 0.035%, 0.040%, 0.045%, or 0.050%. The concentration of poloxamer 188 (Pluronic acid (F-68)) may be 0.0001%-1%. As non-limiting examples, the concentration of poloxamer 188 (Pluronic acid (F-68)) may be 0.0001%, 0.0005%, 0.001%, 0.005%, 0.01%, 0.05%, 0.1%, 0.5%, or 1%. The final solution may have a pH of 6.8-7.7. Non-limiting examples for the pH of the final solution include a pH of 6.8, 6.9, 7.0, 7.1, 7.2, 7.3, 7.4, 7.5, 7.6, or 7.7.

[1270] In some embodiments, an AAV particle described herein may be administered with a pharmaceutically acceptable salt. Examples of pharmaceutically acceptable salts include, but are not limited to, mineral or organic acid salts of basic residues such as amines; alkali or organic salts of acidic residues such as carboxylic acids; and the like. Representative acid addition salts include acetate, acetic acid, adipate, alginate, ascorbate, aspartate, benzenesulfonate, benzene sulfonic acid, benzoate, bisulfate, borate, butyrate, camphorate, camphorsulfonate, citrate, cyclopentanepropionate, digluconate, dodecylsulfate, ethanesulfonate, fumarate, glucoheptonate, glycerophosphate, hemisulfate, heptonate, hexanoate, hydrobromide, hydrochloride, hydroiodide, 2-hydroxy-ethanesulfonate, lactobionate, lactate, laurate, lauryl sulfate, malate, maleate, malonate, methanesulfonate, 2-naphthalenesulfonate, nicotinate, nitrate, oleate, oxalate, palmitate, pamoate, pectinate, persulfate, 3-phenylpropionate, phosphate, picrate, pivalate, propionate, stearate, succinate, sulfate, tartrate, thiocyanate, toluenesulfonate, undecanoate, valerate salts, and the like. Representative alkali or alkaline earth metal salts include sodium, lithium, potassium, calcium, magnesium, and the like, as well as nontoxic ammonium, quaternary ammonium, and amine cations, including, but not limited to ammonium, tetramethylammonium, tetraethylammonium, methylamine, dimethylamine, trimethylamine, triethylamine, ethylamine, and the like. The pharmaceutically acceptable salts of the present disclosure include the conventional non-toxic salts of the parent compound formed, for example, from non-toxic inorganic or organic acids. Lists of additional suitable salts are found in Remington's Pharmaceutical Sciences, 17^{th} ed., Mack Publishing Company, Easton, Pa., 1985, p. 1418, Pharmaceutical Salts: Properties, Selection, and Use, P. H. Stahl and C. G. Wermuth (eds.), Wiley-VCH, 2008, and Berge et al., Journal of Pharmaceutical Science, 66, 1-19 (1977), each of which is incorporated herein by reference in its entirety.

[1271] Relative amounts of an active ingredient (e.g. AAV particle), a pharmaceutically acceptable excipient, and/or any additional ingredients in a pharmaceutical composition in accordance with the present disclosure may vary, depending upon the identity, size, and/or condition of the subject being treated and further depending upon the route by which the composition is to be administered. For example, the composition may comprise between 0.1% and 99% (w/w) of the active ingredient. By way of example, the composition may comprise between 0.1% and 100%, e.g., between 0.5 and 50%, between 1-30%, between 5-80%, or at least 80% (w/w) active ingredient.

[1272] In some embodiments, a formulation comprising an AAV particle described herein comprises a sufficient, e.g., effective amount, of AAV particles for expression of an antibody molecule, e.g., an antibody molecule that binds to HER2. In some embodiments, an AAV particle comprises a genetic element encoding at least 1, 2, 3, 4, or 5 antibody molecules.

[1273] The present disclosure provides, in some embodiments, an AAV particle formulated for delivery to the central nervous system (CNS). In some embodiments, an agent that crosses the brain blood barrier may be used. For example, some cell penetrating peptides that can target molecules to the brain blood barrier endothelium may be used for formulation (e.g., Mathupala, Expert Opin Ther Pat., 2009, 19, 137-140; the content of which is incorporated herein by reference in its entirety).

### Excipients and Diluents

[1274] In some embodiments, a pharmaceutically acceptable excipient may be substantially pure, e.g., having at least 90%, at least 95%, at least 96%, at least 97%, at least 98%, at least 99%, or 100% purity. In some embodiments, an excipient is approved for use for humans and for veterinary use. In some embodiments, an excipient may be approved by United States Food and Drug Administration. In some embodiments, an excipient may be of pharmaceutical grade. In some embodiments, an excipient may meet the standards of the United States Pharmacopoeia (USP), the European Pharmacopoeia (EP), the British Pharmacopoeia, and/or the International Pharmacopoeia.

[1275] In some embodiments, an excipient, as used herein, includes, but is not limited to, any and all solvents, dispersion media, diluents, or other liquid vehicles, dispersion or suspension aids, surface active agents, isotonic agents, thickening or emulsifying agents, preservatives, and the like, as suited to the particular dosage form desired. Various excipients for formulating pharmaceutical compositions and techniques for preparing the composition are known in the art (see Remington: The Science and Practice of Pharmacy, 21st Edition, A. R. Gennaro, Lippincott, Williams & Wilkins, Baltimore, MD, 2006; incorporated herein by reference in its entirety).

[1276] In some embodiments, a pharmaceutically acceptable excipient may include, for example: antiadherents, antioxidants, binders, coatings, compression aids, disintegrants, dyes (colors), emollients, emulsifiers, fillers (diluents), film formers or coatings, flavors, fragrances, glidants (flow enhancers), lubricants, preservatives, printing inks, sorbents, suspensing or dispersing agents, sweeteners, and waters of hydration. Exemplary excipients include, but are not limited to: butylated hydroxytoluene (BHT), calcium carbonate, calcium phosphate (dibasic), calcium stearate, croscarmellose, crosslinked polyvinyl pyrrolidone, citric acid, crospovidone, cysteine, ethylcellulose, gelatin, hydroxypropyl cellulose, hydroxypropyl methylcellulose, lactose, magnesium stearate, maltitol, mannitol, methionine, methylcellulose, methyl paraben, microcrystalline cellulose, polyethylene glycol, polyvinyl pyrrolidone, povidone, pregelatinized starch, propyl paraben, retinyl palmitate, shellac, silicon dioxide, sodium carboxymethyl cellulose, sodium citrate, sodium starch glycolate, sorbitol, starch (corn), stearic acid, sucrose, talc, titanium dioxide, vitamin A, vitamin E, vitamin C, and xylitol.

[1277] In some embodiments, a pharmaceutically acceptable solvent may include, for example, ethanol, water (for example, mono-, di-, and tri-hydrates), N-methylpyrrolidinone (NMP), dimethyl sulfoxide (DMSO), N,N′-dimethylformamide (DMF), N,N′-dimethylacetamide (DMAC), 1,3-dimethyl-2-imidazolidinone (DMEU), 1,3-dimethyl-3,4,5,6-tetrahydro-2-(1H)-pyrimidinone (DMPU), acetonitrile (ACN), propylene glycol, ethyl acetate, benzyl alcohol, 2-pyrrolidone, and benzyl benzoate.

[1278] In some embodiments, the exemplary diluent includes, but is not limited to, calcium carbonate, sodium carbonate, calcium phosphate, dicalcium phosphate, calcium sulfate, calcium hydrogen phosphate, sodium phosphate lactose, sucrose, cellulose, microcrystalline cellulose, kaolin, mannitol, sorbitol, inositol, sodium chloride, dry starch, cornstarch, powdered sugar, etc., and/or combinations thereof.

### Inactive Ingredients

[1279] In some embodiments, a formulation comprising an AAV particle described herein may comprise an inactive ingredient. In some embodiments, an inactive ingredient comprises an agent that does not contribute to the activity of the active ingredient of the pharmaceutical composition included in formulations.

[1280] In some embodiments, a formulation of a pharmaceutical composition comprising an AAV particle disclosed herein may include cations or anions. In some embodiments, the formulation includes a metal cation such as, but not limited to, Zn2+, Ca2+, Cu2+, Mn2+, Mg+ and combinations thereof. As a non-limiting example, a formulation may include a polymer and a complex with a metal cation (See e.g., U.S. Pat. Nos. 6,265,389 and 6,555,525, each of which is herein incorporated by reference in its entirety).

### IV. ADMINISTRATION AND DOSING

### Administration

[1281] In some embodiments, an AAV particle of the present disclosure may be administered by any delivery route which results in a therapeutically effective outcome. In some embodiments, the delivery route includes, but is not limited to, enteral (into the intestine), gastroenteral, epidural (into the dura mater), oral (by way of the mouth), transdermal, intracerebral (into the cerebrum), intracerebroventricular (into the cerebral ventricles), epicutaneous (application onto the skin), intradermal (into the skin itself), subcutaneous (under the skin), nasal administration (through the nose), intravenous (into a vein), intravenous bolus, intravenous drip, intra-arterial (into an artery), intramuscular (into a muscle), intracardiac (into the heart), intraosseous infusion (into the bone marrow), intrathecal (into the spinal canal), intraparenchymal (into brain tissue), intraperitoneal (infusion or injection into the peritoneum), intravesical infusion, intravitreal (through the eye), intracavernous injection (into a pathologic cavity) intracavitary (into the base of the penis), intravaginal administration, intrauterine, extra-amniotic administration, transdermal (diffusion through the intact skin for systemic distribution), transmucosal (diffusion through a mucous membrane), transvaginal, insufflation (snorting), sublingual, sublabial, enema, eye drops (onto the conjunctiva), ear drops, auricular (in or by way of the ear), buccal (directed toward the cheek), conjunctival, cutaneous, dental (to a tooth or teeth), electro-osmosis, endocervical, endosinusial, endotracheal, extracorporeal, hemodialysis, infiltration, interstitial, intra-abdominal, intra-amniotic, intra-articular, intrabiliary, intrabronchial, intrabursal, intracartilaginous (within a cartilage), intracaudal (within the cauda equine), intracisternal (within the cisterna magna cerebellomedularis), intracorneal (within the cornea), dental intracoronal, intracoronary (within the coronary arteries), intracorporus cavernosum (within the dilatable spaces of the corporus cavernosa of the penis), intradiscal (within a disc), intraductal (within a duct of a gland), intraduodenal (within the duodenum), intradural (within or beneath the dura), intraepidermal (to the epidermis), intraesophageal (to the esophagus), intragastric (within the stomach), intragingival (within the gingivae), intraileal (within the distal portion of the small intestine), intralesional (within or introduced directly to a localized lesion), intraluminal (within a lumen of a tube), intralymphatic (within the lymph), intramedullary (within the marrow cavity of a bone), intrameningeal (within the meninges), intramyocardial (within the myocardium), intraocular (within the eye), intraovarian (within the ovary), intrapericardial (within the pericardium), intrapleural (within the pleura), intraprostatic (within the prostate gland), intrapulmonary (within the lungs or its bronchi), intrasinal (within the nasal or periorbital sinuses), intraspinal (within the vertebral column), intrasynovial (within the synovial cavity of a joint), intratendinous (within a tendon), intratesticular (within the testicle), intrathecal (within the cerebrospinal fluid at any level of the cerebrospinal axis), intrathoracic (within the thorax), intratubular (within the tubules of an organ), intratumor (within a tumor), intratympanic (within the aurus media), intravascular (within a vessel or vessels), intraventricular (within a ventricle), iontophoresis (by means of electric current where ions of soluble salts migrate into the tissues of the body), irrigation (to bathe or flush open wounds or body cavities), laryngeal (directly upon the larynx), nasogastric (through the nose and into the stomach), occlusive dressing technique (topical route administration which is then covered by a dressing which occludes the area), ophthalmic (to the external eye), oropharyngeal (directly to the mouth and pharynx), parenteral, percutaneous, periarticular, peridural, perineural, periodontal, rectal, respiratory (within the respiratory tract by inhaling orally or nasally for local or systemic effect), retrobulbar (behind the pons or behind the eyeball), soft tissue, subarachnoid, subconjunctival, submucosal, topical, transplacental (through or across the placenta), transtracheal (through the wall of the trachea), transtympanic (across or through the tympanic cavity), ureteral (to the ureter), urethral (to the urethra), vaginal, caudal block, diagnostic, nerve block, biliary perfusion, cardiac perfusion, photopheresis, and spinal.

[1282] A further aspect of the present invention relates to a method of treating a subject having or diagnosed with having cancer expressing HER2/neu, comprising administering to the subject an effective amount of a pharmaceutical composition comprising an AAV particle or vector, genetic element, or isolated nucleic acid as described herein. In some embodiments, the subject is administered an AAV particle of the present invention. In some embodiments, the subject is being treated for a disease associated with HER2/neu expression. In some embodiments, the disease associated with HER2/neu expression is a HER2/neu-positive solid tumor. In some embodiments, the HER2/neu positive tumor is metastatic. In some embodiments the HER/neu positive cancer is breast cancer, gastric cancer, gastroesophageal junction cancer, colorectal cancer, lung cancer (e.g., non-small cell lung carcinoma), pancreatic cancer, bladder cancer, salivary duct cancer, ovarian cancer (e.g., epithelial ovarian cancer), endometrial cancer, prostate cancer, bone cancer and brain cancer. In some embodiments, the HER2/neu positive cancer has metastasized to the central nervous system (CNS). In some embodiments, the HER2/neu positive cancer is breast cancer. In some embodiments, the subject is a human. In some embodiments, the subject has previously undergone surgical resection of a HER2/neu-positive solid tumor. In some embodiments, the AAV particle is administered to the subject intramuscularly, intravenously, intratumorally, intracerebrally, intrathecally, intracerebroventricularly, via intraparenchymal administration, via focused ultrasound (FUS), e.g., coupled with the intravenous administration of microbubbles (FUS-MB), or MRI-guided FUS coupled with intravenous administration, or via intra-cisterna magna injection (ICM). In some embodiments, the AAV particle is administered to the subject intravenously. In some embodiments, the AAV particle is administered to the subject intratumorally. In some embodiments, the AAV particle is administered to the subject via intra-cisterna magna injection (ICM). In some embodiments, the AAV particle is administered prior to, concurrently with, or post a surgical resection of a HER2/neu-positive solid tumor. In some embodiments, the AAV particle is administered to a site of surgical resection of a HER2/neu-positive solid tumor in the subject. In some embodiments, the AAV particle is administered to the area around a site of surgical resection of a HER2/neu-positive solid tumor, e.g., the margins of the tumor, in the subject.

[1283] In some embodiments, an AAV particle described herein may be administered to a subject via such a route that it is able to cross the blood-brain barrier, vascular barrier, or other epithelial barrier. In some embodiments, an AAV particle of the present disclosure may be administered in any suitable form, either as a liquid solution or suspension, as a solid form suitable for liquid solution or suspension in a liquid solution. In some embodiments, an AAV particle may be formulated with any appropriate and pharmaceutically acceptable excipient.

[1284] In some embodiments, an AAV particle of the present disclosure may be delivered to a subject via a single route administration. In some embodiments, an AAV particle of the present disclosure may be delivered to a subject via a multi-site route of administration. In some embodiments, a subject may be administered at 2, 3, 4, 5, or more than 5 sites.

[1285] In some embodiments, an AAV particle of the present disclosure is administered via a bolus infusion. In some embodiments, an AAV particle of the present disclosure is administered via sustained delivery over a period of minutes, hours, or days. In some embodiments, the infusion rate may be changed depending on the subject, distribution, formulation, and/or another delivery parameter. In some embodiments, an AAV particle of the present disclosure is administered using a controlled release, e.g., a release profile that conforms to a particular pattern of release to effect a therapeutic outcome. In some embodiments, an AAV particle of the present disclosure is administered using a sustained release, e.g., a release profile that conforms to a release rate over a specific period of time.

[1286] In some embodiments, an AAV particle may be delivered by more than one route of administration. As non-limiting examples of combination administrations, an AAV particle may be delivered by intrathecal and intracerebroventricular, or by intravenous and intraparenchymal administration. In some embodiments, an AAV particle may be delivered intra-tumoral and/or delivered into resection void (e.g., the space left from the removal of a tumor).

### Intravenous Administration

[1287] In some embodiments, an AAV particle described herein may be administered to a subject by systemic administration. In some embodiments, the systemic administration is intravenous administration. In another embodiment, the systemic administration is intraarterial administration. In some embodiments, an AAV particle of the present disclosure may be administered to a subject by intravenous administration. In some embodiments, the intravenous administration may be achieved by subcutaneous delivery. In some embodiments, the AAV particle is administered to the subject via focused ultrasound (FUS), e.g., coupled with the intravenous administration of microbubbles (FUS-MB) or MRI-guided FUS coupled with intravenous administration, e.g., as described in Terstappen et al. (Nat Rev Drug Discovery, https://doi.org/10.1038/s41573-021-00139-y (2021)), the contents of which are incorporated herein by reference in its entirety. In some embodiments, the AAV particle is administered to the subject intravenously. In some embodiments, the intravenous administration may be achieved by a tail vein injection (e.g., in a mouse model). In some embodiments, the intravenous administration may be achieved by retro-orbital injection.

### Administration to the CNS

[1288] In some embodiments, an AAV particle described herein may be delivered by direct injection into the brain. As a non-limiting example, the brain delivery may be by intrahippocampal administration. In some embodiments, an AAV particle of the present disclosure may be administered to a subject by intraparenchymal administration. In some embodiments, the intraparenchymal administration is to tissue of the central nervous system. In some embodiments, an AAV particle of the present disclosure may be administered to a subject by intracranial delivery (See, e.g., U.S. Pat. No. 8,119,611; the content of which is incorporated herein by reference in its entirety). In some embodiments, an AAV particle described herein may be delivered by injection into the CSF pathway. Non-limiting examples of delivery to the CSF pathway include intrathecal and intracerebroventricular administration. In some embodiments, the AAV particle is administered via intra cisterna magna (ICM).

[1289] In some embodiments, an AAV particle may be delivered to the brain by systemic delivery. As a non-limiting example, the systemic delivery may be by intravascular administration. As a non-limiting example, the systemic or intravascular administration may be intravenous.

[1290] In some embodiments, an AAV particle of the present disclosure may be delivered by an intraocular delivery route. A non-limiting example of an intraocular administration includes an intravitreal injection.

### Intramuscular Administration

[1291] In some embodiments, an AAV particle described herein may be delivered by intramuscular administration. Without wishing to be bound by theory, it is believed in some embodiments, that the multi-nucleated nature of muscle cells provides an advantage to gene transduction subsequent to AAV delivery. In some embodiments, cells of the muscle are capable of expressing recombinant proteins with the appropriate post-translational modifications. Without wishing to be bound by theory, it is believed in some embodiments, the enrichment of muscle tissue with vascular structures allows for transfer to the blood stream and whole-body delivery. Examples of intramuscular administration include systemic (e.g., intravenous), subcutaneous or directly into the muscle. In some embodiments, more than one injection is administered. In some embodiments, an AAV particle of the present disclosure may be delivered by an intramuscular delivery route. (See, e.g., U.S. Pat. No. 6,506,379; the content of which is incorporated herein by reference in its entirety). Non-limiting examples of intramuscular administration include an intravenous injection or a subcutaneous injection.

[1292] In some embodiments, an AAV particle of the present disclosure is administered to a subject and transduces the muscle of a subject. As a non-limiting example, an AAV particle is administered by intramuscular administration. In some embodiments, an AAV particle of the present disclosure may be administered to a subject by subcutaneous administration. In some embodiments, the intramuscular administration is via systemic delivery. In some embodiments, the intramuscular administration is via intravenous delivery. In some embodiments, the intramuscular administration is via direct injection to the muscle.

[1293] In some embodiments, the muscle is transduced by administration, e.g., intramuscular administration. In some embodiments, an intramuscular delivery comprises administration at one site. In some embodiments, an intramuscular delivery comprises administration at more than one site. In some embodiments, an intramuscular delivery comprises administration at two sites. In some embodiments, an intramuscular delivery comprises administration at three sites. In some embodiments, an intramuscular delivery comprises administration at four sites. In some embodiments, an intramuscular delivery comprises administration at more than four sites. In some embodiments, intramuscular delivery is combined with at least one other method of administration.

[1294] In some embodiments, an AAV particle may be administered to a subject by peripheral injections. Non-limiting examples of peripheral injections include intraperitoneal, intramuscular, intravenous, conjunctival, or joint injection. It was disclosed in the art that the peripheral administration of AAV vectors can be transported to the central nervous system, for example, to the motor neurons (e.g., U.S. Patent Publication Nos. US20100240739 and US20100130594; the content of each of which is incorporated herein by reference in their entirety).

[1295] In some embodiments, an AAV particle of the present disclosure may be administered to a subject by intraparenchymal administration. In some embodiments, the intraparenchymal administration is to muscle tissue. In some embodiments, an AAV particle of the present disclosure is delivered as described in Bright et al 2015 (Neurobiol Aging. 36(2):693-709), the contents of which are herein incorporated by reference in their entirety. In some embodiments, an AAV particle of the present disclosure is administered to the gastrocnemius muscle of a subject. In some embodiments, an AAV particle of the present disclosure is administered to the bicep femorii of the subject. In some embodiments, an AAV particles of the present disclosure is administered to the tibialis anterior muscles. In some embodiments, an AAV particle of the present disclosure is administered to the soleus muscle.

### Depot Administration

[1296] As described herein, in some embodiments, a pharmaceutical composition and/or an AAV particle of the present disclosure are formulated in depots for extended release. Generally, specific organs or tissues are targeted for administration.

[1297] In some embodiments, a pharmaceutical composition and/or an AAV particle of the present disclosure are spatially retained within or proximal to target tissues. Provided are methods of providing a pharmaceutical composition, an AAV particle, to target tissues of mammalian subjects by contacting target tissues (which comprise one or more target cells) with the pharmaceutical composition and/or the AAV particle, under conditions such that they are substantially retained in target tissues, e.g., such that at least 10, 20, 30, 40, 50, 60, 70, 80, 85, 90, 95, 96, 97, 98, 99, 99.9, 99.99 or greater than 99.99% of the composition is retained in the target tissues. In some embodiments, retention is determined by measuring the amount of pharmaceutical composition and/or AAV particle, that enter a target cell or a plurality of target cells. For example, at least 1%, 5%, 10%, 20%, 30%, 40%, 50%, 60%, 70%, 80%, 85%, 90%, 95%, 96%, 97%, 98%, 99%, 99.9%, 99.99%, or greater than 99.99% of a pharmaceutical composition and/or an AAV particle, administered to a subject are present intracellularly at a period of time following administration. For example, intramuscular injection to a subject may be performed using aqueous compositions comprising a pharmaceutical composition and/or an AAV particle of the present disclosure and a transfection reagent, and retention is determined by measuring the amount of the pharmaceutical composition and/or the AAV particle, present in the muscle cell or plurality of muscle cells.

[1298] In some embodiments, disclosed herein are methods of providing a pharmaceutical composition and/or an AAV particle of the present disclosure to a tissue of a subject, by contacting the tissue (comprising a cell, e.g., a plurality of cells) with the pharmaceutical composition and/or the AAV particle under conditions such that they are substantially retained in the tissue. In some embodiments, a pharmaceutical composition and/or AAV particle described herein comprise a sufficient amount of an active ingredient such that the effect of interest is produced in at least one cell. In some embodiments, a pharmaceutical composition and/or an AAV particle generally comprise one or more cell penetration agents. In some embodiments, the disclosure provides a naked formulations (such as without cell penetration agents or other agents), with or without pharmaceutically acceptable carriers.

### Delivery

[1299] In some embodiments, an AAV particle or a pharmaceutical composition of the present disclosure may be administered or delivered using the methods for treatment of disease described in U.S. Pat. No. 8,999,948, or International Publication No. WO2014178863, the contents of which are herein incorporated by reference in their entirety.

[1300] In some embodiments, an AAV particle or a pharmaceutical composition of the present disclosure may be administered or delivered using the methods for delivering gene therapy as described in US Application No. 20150126590, the contents of which are herein incorporated by reference in their entirety.

[1301] In some embodiments, an AAV particle or a pharmaceutical composition of the present disclosure may be administered or delivered using the methods for delivery of a CNS gene therapy as described in U.S. Pat. Nos. 6,436,708, and 8,946,152, and International Publication No. WO2015168666, the contents of which are herein incorporated by reference in their entirety.

[1302] In some embodiments, an AAV particle or a pharmaceutical composition of the present disclosure may be administered or delivered using the methods for delivering a protein using an AAV vector described in European Patent Application No. EP2678433, the contents of which are herein incorporated by reference in their entirety.

[1303] In some embodiments, an AAV particle or a pharmaceutical composition of the present disclosure may be administered or delivered using the methods for delivering DNA to the bloodstream described in U.S. Pat. No. 6,211,163, the contents of which are herein incorporated by reference in their entirety.

[1304] In some embodiments, an AAV particle or a pharmaceutical composition of the present disclosure may be administered or delivered using the methods for delivering a payload to the central nervous system described in U.S. Pat. No. 7,588,757, the contents of which are herein incorporated by reference in their entirety.

[1305] In some embodiments, an AAV particle or a pharmaceutical composition of the present disclosure may be administered or delivered using the methods for delivering a payload described in U.S. Pat. No. 8,283,151, the contents of which are herein incorporated by reference in their entirety.

[1306] In some embodiments, an AAV particle or a pharmaceutical composition of the present disclosure may be administered or delivered using the methods for delivering a payload using a glutamic acid decarboxylase (GAD) delivery vector described in International Patent Publication No. WO2001089583, the contents of which are herein incorporated by reference in their entirety.

[1307] In some embodiments, an AAV particle or a pharmaceutical composition of the present disclosure may be administered or delivered using the methods for delivering a payload to neural cells described in International Patent Publication No. WO2012057363, the contents of which are herein incorporated by reference in their entirety.

### Delivery to Cells

[1308] The present disclosure also provides a method of delivering to a cell or a tissue any of the above-described AAV particles, comprising contacting the cell or tissue with said AAV particle or contacting the cell or tissue with a formulation comprising said AAV particle, or contacting the cell or tissue with any of the described compositions, e.g., a pharmaceutical composition described herein. The method of delivering an AAV particle to a cell or tissue can be accomplished in vitro, ex vivo, or in vivo.

### Delivery to Subjects

[1309] The present disclosure also provides a method of delivering to a subject, e.g., a mammalian subject, any of the above-described AAV particles comprising administering to the subject said AAV particle, or administering to the subject a formulation comprising said AAV particle, or administering to the subject any of the described compositions, including pharmaceutical compositions.

### Dose and Regimen

[1310] The present disclosure provides methods of administering an AAV particle described herein to a subject in need thereof. A pharmaceutical, diagnostic, or prophylactic AAV particle and composition of the present disclosure may be administered to a subject using any amount and any route of administration effective for preventing, treating, managing, or diagnosing a disease, disorder and/or condition. In some embodiments, an effective amount of an AAV particle will vary from subject to subject, depending on the species, age, and general condition of the subject, the severity of the disease, the particular composition, its mode of administration, its mode of activity, and the like. The subject may be a human, a mouse, a non-human primate, a mammal, or an animal. In some embodiments, a composition in accordance with the disclosure can be formulated in unit dosage form for ease of administration and uniformity of dosage. In some embodiments, the total daily usage of a composition of the present disclosure may be decided by the attending physician within the scope of sound medical judgment. In some embodiments, a therapeutically effective, prophylactically effective, or appropriate diagnostic dose level for a subject may depend upon a variety of factors including the disorder being treated and the severity of the disorder; the activity of the specific payload employed; the specific composition employed; the age, body weight, general health, sex and diet of the patient; the time of administration, route of administration, and rate of excretion of the AAV particle employed; the duration of the treatment; drugs used in combination or coincidental with the AAV particle employed; and like factors well known in the medical arts.

[1311] In some embodiments, a pharmaceutical composition comprising an AAV particle of the present disclosure may be administered at dosage levels sufficient to deliver from about 0.0001 mg/kg to about 100 mg/kg, e.g., from about 0.001 mg/kg to about 0.05 mg/kg, from about 0.005 mg/kg to about 0.05 mg/kg, from about 0.001 mg/kg to about 0.005 mg/kg, from about 0.05 mg/kg to about 0.5 mg/kg, from about 0.01 mg/kg to about 50 mg/kg, from about 0.1 mg/kg to about 40 mg/kg, from about 0.5 mg/kg to about 30 mg/kg, from about 0.01 mg/kg to about 10 mg/kg, from about 0.1 mg/kg to about 10 mg/kg, or from about 1 mg/kg to about 25 mg/kg, of subject body weight per day, one or more times a day, to obtain the desired therapeutic, diagnostic, or prophylactic, effect. In some embodiments, the above dosing concentrations may be converted to vg or viral genomes (e.g., a genetic element as described herein) per kg or into total viral genomes administered by one of skill in the art.

[1312] In some embodiments, a pharmaceutical composition comprising an AAV particle in accordance with the present disclosure may be administered at about 10 to about 600 μl/site, 50 to about 500 μl/site, 100 to about 400 μl/site, 120 to about 300 μl/site, 140 to about 200 μl/site, about 160 μl/site. As non-limiting examples, AAV particles may be administered at 50 μl/site and/or 150 μl/site.

[1313] In some embodiments, a dosage may be delivered using multiple administrations (e.g., two, three, four, or more than four administrations). In some embodiments, when multiple administrations are used, a split dosing regimen, such as those described herein, may be used. In some embodiments, a split dose is the division of single unit dose or total daily dose into two or more doses, e.g., two or more administrations of the single unit dose. In some embodiments, a single unit dose is a dose of any therapeutic administered in one dose/at one time/single route/single point of contact, e.g., a single administration event.

[1314] In some embodiments, a dosage of an AAV particle of the present disclosure may be administered as a pulse dose or as a continuous flow. In some embodiments, a pulse dose comprises a series of single unit doses of any therapeutic administered with a set frequency over a period of time. In some embodiments, a continuous flow comprises a dose of therapeutic administered continuously for a period of time in a single route/single point of contact, e.g., a continuous administration event. In some embodiments, a total daily dose, e.g., an amount given or prescribed in 24-hour period, may be administered by any of these methods, or as a combination of these methods, or by any other methods suitable for a pharmaceutical administration.

[1315] In some embodiments, delivery of an AAV particle of the present disclosure to a subject provides neutralizing activity to a subject. In some embodiments, the neutralizing activity can be for at least 1 month, 2 months, 3 months, 4 months, 5 months, 6 months, 7 months, 8 months, 9 months, 10 months, 11 months, 1 year, 13 months, 14 months, 15 months, 16 months, 17 months, 18 months, 19 months, 20 months, 20 months, 21 months, 22 months, 23 months, 2 years, 3 years, 4 years, 5 years, 6 years, 7 years, 8 years, 9 years, 10 years or more than 10 years.

[1316] In some embodiments, delivery of an AAV particle may comprise a total dose between about 1×10⁶ VG and about 1×10¹⁶ VG. In some embodiments, delivery may comprise a total dose of about 1×10⁶, 2×10⁶, 3×10⁶, 4×10⁶, 5×10⁶, 6×10⁶, 7×10⁶, 8×10⁶, 9×10⁶, 1×10⁷, 2×10⁷, 3×10⁷, 4×10⁷, 5×10⁷, 6×10⁷, 7×10⁷, 8×10⁷, 9×10⁷, 1×10⁸, 2×10⁸, 3×10⁸, 4×10⁸, 5×10, 6×10⁸, 7×10⁸, 8×10⁸, 9×10⁸, 1×10⁹, 2×10⁹, 3×10⁹, 4×10⁹, 5×10⁹, 6×10⁹, 7×10⁹, 8×10⁹, 9×10⁹, 1×10¹⁰, 1.9×10¹⁰, 2×10¹⁰, 3×10¹⁰, 3.73×10¹⁰, 4×10¹⁰, 5×10¹⁰, 6×10¹⁰, 7×10¹⁰, 8×10¹⁰, 9×10¹⁰, 1×10¹¹, 2×10¹¹, 2.5×10¹¹, 3×10¹¹, 4×10¹¹, 5×10¹¹, 6×10¹¹, 7×10¹¹, 8×10¹¹, 9×10¹¹, 1×10¹², 2×10¹², 3×10¹², 4×10¹², 5×10¹², 6×10¹², 7×10¹², 8×10¹², 9×10¹², 1×10¹³, 2×10¹³, 3×10¹³, 4×10¹³, 5×10¹³, 6×10³, 7×10¹³, 8×10¹³, 9×10¹³, 1×10¹⁴, 2×10¹⁴, 3×10¹⁴, 4×10¹⁴, 5×10¹⁴, 6×10¹⁴, 7×10¹⁴, 8×10¹⁴, 9×10¹⁴, 1×10¹⁵, 2×10¹⁵, 3×10⁵, 4×10⁵, 5×10⁵, 6×10⁵, 7×10⁵, 8×10⁵, 9×10⁵, or 1×10¹⁶ VG. As a non-limiting example, the total dose is 1×10¹³ VG. As another non-limiting example, the total dose is 2.1×10¹² VG.

[1317] In some embodiments, delivery of an AAV particle may comprise a composition concentration between about 1×10⁶ VG/mL and about 1×10¹⁶ VG/mL. In some embodiments, delivery may comprise a composition concentration of about 1×10⁶, 2×10⁶, 3×10⁶, 4×10⁶, 5×10⁶, 6×10⁶, 7×10⁶, 8×10⁶, 9×10⁶, 1×10⁷, 2×10⁷, 3×10⁷, 4×10⁷, 5×10⁷, 6×10⁷, 7×10⁷, 8×10⁷, 9×10⁷, 1×10⁸, 2×10⁸, 3×10⁸, 4×10⁸, 5×10⁸, 6×10⁸, 7×10⁸, 8×10⁸, 9×10⁸, 1×10⁹, 2×10⁹, 3×10⁹, 4×10⁹, 5×10⁹, 6×10⁹, 7×10⁹, 8×10⁹, 9×10⁹, 1×10¹⁰, 2×10¹⁰, 3×10¹⁰, 4×10¹⁰, 5×10¹⁰, 6×10¹⁰, 7×10¹⁰, 8×10¹⁰, 9×10¹⁰, 1×10¹¹, 2×10¹¹, 3×10¹¹, 4×10¹¹, 5×10¹¹, 6×10¹¹, 7×10¹¹, 8×10¹¹, 9×10¹¹, 1×10¹², 2×10¹², 3×10¹², 4×10¹², 5×10¹², 6×10¹², 7×10¹², 8×10¹², 9×10¹², 1×10¹³, 2×10¹³, 3×10¹³, 4×10¹³, 5×10³, 6×10¹³, 7×10¹³, 8×10¹³, 9×10¹³, 1×10¹⁴, 2×10¹⁴, 3×10¹⁴, 4×10¹⁴, 5×10¹⁴, 6×10¹⁴, 7×10¹⁴, 8×10¹⁴, 9×10¹⁴, 1×10¹, 2×10¹⁵, 3×10¹⁵, 4×10¹⁵, 5×10¹⁵, 6×10¹⁵, 7×10⁵, 8×10¹⁵, 9×10¹⁵, or 1×10¹⁶ VG/mL. In some embodiments, the delivery comprises a composition concentration of 1×10¹³ VG/mL. In some embodiments, the delivery comprises a composition concentration of 2.1×10¹² VG/mL.

### Combinations

[1318] In some embodiments, an AAV particle described herein may be used in combination with one or more other therapeutic, prophylactic, research or diagnostic agents. In some embodiments, the agents are administered at the same time and/or are formulated for delivery together, e.g., simultaneous delivery. In some embodiments, the agents are formulated for sequential delivery. In some embodiments, compositions can be administered concurrently with, prior to, or subsequent to, one or more other desired therapeutics or medical procedures. In general, each agent will be administered at a dose and/or on a time schedule determined for that agent. In some embodiments, the present disclosure encompasses the delivery of pharmaceutical, prophylactic, research, or diagnostic compositions in combination with agents that may improve their bioavailability, reduce and/or modify their metabolism, inhibit their excretion, and/or modify their distribution within the body.

### Measurement of Expression

[1319] In some embodiments, the methods provided herein further comprise evaluating, e.g., measuring, the level of a payload, e.g., an antibody molecule, generated in a subject, e.g., in a cell or tissue of the subject. In some embodiments, the cell is a neuronal cell. In some embodiments, the cell is an endothelial cell. In some embodiments, the tissue is a central nervous system (CNS) tissue, e.g., a brain tissue. In some embodiments, the tissue is one known to show increased levels of an ErbB receptor tyrosine kinase. The ErbB receptor tyrosine kinase family includes at least four distinct members including Epidermal Growth Factor Receptor (EGFR or ErbB1), HER2 (ErbB2 or p185neu), HER3 (ErbB3) and HER4 (ErbB4 or tyro2). Amplification of HER2 is often observed in breast and ovarian cancers. Overexpression of HER2 (frequently but not uniformly due to gene amplification) has also been observed in carcinomas of the stomach, endometrium, salivary gland, lung, kidney, colon, thyroid, pancreas and bladder. In some embodiments, the tissue is a breast or ovarian tissue. In some embodiments, the tissue is a stomach tissue, endometrium tissue, salivary gland tissue, lung tissue, kidney tissue, colon tissue, thyroid tissue, pancreas tissue or bladder tissue. In some embodiments, the method further comprises a blood test, an imaging test, a CNS biopsy sample, or an aqueous cerebral spinal fluid biopsy. In some embodiments, measuring the level of antibody molecules is performed prior to, during, or subsequent to treatment with the AAV particle, e.g., plurality of AAV particles.

[1320] In some embodiments, expression of a payload encoded by a genetic element described herein may be measured using various methods known in the art such as, but not limited to immunochemistry (e.g., IHC), in situ hybridization (ISH), enzyme-linked immunosorbent assay (ELISA), affinity ELISA, ELISPOT, flow cytometry, immunocytology, immunohistochemistry, surface plasmon resonance analysis, kinetic exclusion assay, liquid chromatography-mass spectrometry (LCMS), high-performance liquid chromatography (HPLC), BCA assay, immunoelectrophoresis, Western blot, SDS-PAGE, protein immunoprecipitation, and/or PCR.

### V. METHODS AND USES OF THE COMPOSITIONS

[1321] The present disclosure provides a method of delivering an exogenous antibody molecule that binds to HER2, to a subject. In some embodiments, the method comprising administering an effective amount of a pharmaceutical composition described herein or an AAV particle, e.g., a plurality of AAV particles, comprising an AAV vector, and/or a genetic element encoding an antibody molecule (e.g., an anti-HER2 antibody) described herein. In some embodiments, the subject has, has been diagnosed with having, or is at risk of having a disease or disorder, e.g., a disease associated with over-expression of HER2 (e.g., cancer and/or metastatic cancer).

[1322] The present disclosure also provides a method of treating a disease, disorder and/or condition in a subject, comprising administering to the subject any of the AAV particles described herein or administering to the subject an effective amount of a pharmaceutical composition described herein or an AAV particle, e.g., a plurality of AAV particles, comprising an AAV vector, and/or a genetic element encoding an antibody molecule (e.g., an anti-HER2 antibody) described herein.

[1323] In some embodiments, an AAV particle of the present disclosure is administered to a subject prophylactically. In some embodiments, an AAV particle of the present disclosure is administered to a subject having, diagnosed with having, or at risk of having a disease or disorder, e.g., a disease and/or a disorder associated with over-expression of HER2 (e.g., cancer and/or metastatic cancer).

[1324] In some embodiments, an AAV particle or a plurality of AAV particles of the present disclosure are part of an active immunization strategy to protect against a disease and disorder, e.g., a disease and/or a disorder associated with over-expression of HER2 (e.g., cancer and/or metastatic cancer). In some embodiments, in an active immunization strategy, a vaccine or an AAV particle is administered to a subject to prevent a disease by activating the subject's production of antibodies.

[1325] In some embodiments, an AAV particle or a plurality of AAV particles of the present disclosure are part of a passive immunization strategy. In some embodiments, in a passive immunization strategy, antibody molecules against a particular agent or antigen are given directly to the subject.

[1326] In some embodiments, an AAV particle or a plurality of AAV particles of the present disclosure may be used for passive immunotherapy of a disease and/or a disorder associated with over-expression of HER2 (e.g., cancer and/or metastatic cancer). As a non-limiting example, an AAV particles of the present disclosure may encode an anti-HER2 antibody molecule, e.g., as described in Tables 3A-3C. In some embodiments, an AAV particle may be administered by bilateral intraparenchymal delivery directly to the hippocampus.

[1327] Without wishing to be bound by theory, it is believed in some embodiments, that administration of an AAV particle or plurality of AAV particles of the present disclosure may result in substantially higher antibody levels in a cell (e.g., a neuronal cell or an endothelial cell) or tissue (e.g., a CNS tissue) of the subject, than if anti-HER2 antibody molecule were administered by passive immunization. While not wishing to be bound by theory, it is believed in some embodiments that passive immunization is thought to generate 20-40 ng of antibody per mg of protein in the brain of a subject. In some embodiments, AAV-mediated delivery of an antibody molecule results in antibody levels 2-5× above the levels observed, e.g., measured, with passive immunization. In some embodiments, AAV-mediated delivery of an antibody molecule results in antibody levels 1.5-3× above the levels observed, e.g., measured, with passive immunization. In some embodiments, AAV-mediated delivery of an antibody molecule results in antibody levels 5-10× above the levels observed, e.g., measured, with passive immunization. In some embodiments, AAV-mediated delivery of an antibody molecule results in antibody levels 8-16× above the levels observed, e.g., measured, with passive immunization.

### Diagnostic Applications

[1328] In some embodiments, an AAV particle of the present disclosure may be used for a diagnostic purpose or as diagnostic tools for any disease and/or disorder associated with HER2 over-expression (e.g., cancer and/or metastatic cancer). As non-limiting examples, an AAV particle of the present disclosure or the antibody molecule encoded by a genetic element therein may be used as a biomarker for disease diagnosis. As a second non-limiting example, an AAV particle of the present disclosure or the antibody molecule encoded by a genetic element therein may be used for diagnostic imaging purposes, e.g., MRI, PET, CT or ultrasound.

### Preventative Applications

[1329] In some embodiments, an AAV particle of the present disclosure or an antibody molecule encoded by a genetic element therein may be used to prevent a disease or stabilize progression of a disease. In some embodiments, an AAV particle of the present disclosure is used as a prophylactic to prevent a disease or disorder. In some embodiments, an AAV particle of the present disclosure is used to halt further progression of a disease or disorder. As a non-limiting example, an AAV particle may be used in a manner similar to that of a vaccine.

### Research Applications

[1330] In some embodiments, an AAV particle of the present disclosure or an antibody molecule encoded by a genetic element therein may be used as a research tool. In some embodiments, an AAV particle may be used as in any research experiment, e.g., in vivo or in vitro experiments. In a non-limiting example, an AAV particle may be used in a cultured cell, or plurality of cultured cells. The cultured cells may be produced from any origin known to one with skill in the art, and may be as non-limiting examples, produced from a stable cell line, an animal model or a human patient or control subject. In a non-limiting example, an AAV particle may be used in in vivo experiments in an animal model (e.g., a mouse, rat, rabbit, dog, cat, non-human primate, guinea pig, ferret, c-elegans, drosophila, zebrafish, or any other animal used for research purposes, known in the art). In another non-limiting example, an AAV particle may be used in a human research experiment or a human clinical trial.

### Therapeutic Applications

[1331] The present disclosure additionally provides a method of treating a disease associated with HER2 over-expression in a subject, e.g., a human subject, comprising administering to the subject any of the AAV particles described herein or administering to the subject an effective amount of a pharmaceutical composition described herein or an AAV particle, e.g., a plurality of AAV particles, comprising an AAV vector, and/or a genetic element encoding an antibody molecule (e.g., an anti-HER2 antibody) described herein. In some embodiments, a disease associated with HER2 over-expression comprises indications involving irregular cell proliferation. In some embodiments, treatment of a disease associated with HER2 over-expression comprises prevention of said disease associated with HER2 over-expression. In some embodiments, the subject has previously been treated for HER2+ cancer.

[1332] In some embodiments, the disease associated with HER2 over-expression in a subject is a HER2-positive cancer. Current methodologies for determining of HER2 status include immunohistochemistry (IHC) to detect HER2 protein overexpression, fluorescence in situ hybridization (FISH), or chromogenic in situ hybridization to detect amplification of the HER2 gene. A “HER2 positive” cancer, cancer cell, subject or patient, as used herein, refers to a cancer, cancer cell, subject, or patient exhibiting a score of at least 2 when using a HercepTest® (DakoCytomation California Inc., Carpenteria, Calif.) or a cancer, cancer cell, subject, or patient that has been identified as such by FISH, having a centromere 17 corrected HER2 gene copy number greater than 2 (HER2 FISH/CEP17>2; FISH positive). In certain embodiments, the HER2 positive cell exhibits a score of at least 2+ or 3+ using the HercepTest® Immunohistochemistry assay.

[1333] In some instances, the HER2-positive cancer is a HER2-positive solid tumor. Additionally, or alternatively, the HER2-positive cancer may be a locally advanced or metastatic HER2-positive cancer. In some instances, the HER2-positive cancer is a HER2-positive breast cancer or a HER2-positive gastric cancer. In some embodiments, the HER2-positive cancer is selected from the group consisting of a HER2-positive gastroesophageal junction cancer, a HER2-positive colorectal cancer, a HER2-positive lung cancer (e.g., a HER2-positive non-small cell lung carcinoma), a HER2-positive pancreatic cancer, a HER2-positive colorectal cancer, a HER2-positive bladder cancer, a HER2-positive salivary duct cancer, a HER2-positive ovarian cancer (e.g., a HER2-positive epithelial ovarian cancer), or a HER2-positive endometrial cancer. In some instances, the HER2-positive cancer is prostate cancer.

[1334] In some embodiments, the HER2-positive cancer has metastasized to the central nervous system (CNS). In some instances, the metastasized HER2-cancer has formed CNS neoplasms. Examples of primary CNS cancers could be gliomas (which may include glioblastoma (also known as glioblastoma multiforme), astrocytomas, oligodendrogliomas, and ependymomas, and mixed gliomas), meningiomas, medulloblastomas, neuromas, and primary CNS lymphoma (in the brain, spinal cord, or meninges), among others. Examples of metastatic cancers include those originating in another tissue or organ, e.g., breast, lung, lymphoma, leukemia, melanoma (skin cancer), colon, kidney, prostate, or other types that metastasize to brain.

[1335] In some embodiments, the HER2-positive cancer is breast cancer. Breast cancer is known to be a heterogeneous disease. There are different subtypes that can be defined based on (i) a molecular profile of a breast cancer tumor, (ii) gene array testing, or (iii) an immunohistochemical analysis approach. In some embodiments the breast cancer is Basal or Luminal subtype. In particular, mammary ducts are bilayered structures composed of a luminal layer and a myoepithelial layer that adhere to a basement membrane. The term basal refers to certain cancers that arise from the basal layer of the stratified epithelia. Breast carcinomas of the basal subtype reside in the basal layer of the ductal epithelium of the breast as opposed to the apical or luminal layers. Such cancers have distinct cytological features and gene expression profiles such as an intermediate filament profile (cytokeratins) first observed in the basal cells of the skin.

[1336] Most breast cancers are luminal tumors. Luminal tumor cells look like the cells of breast cancers that start in the inner (luminal) cells lining the mammary ducts. Of the four subtypes of luminal cancer, luminal A tumors tend to have the best prognosis, with fairly high survival rates and fairly low recurrence rates. Luminal B breast cancers are ER+ and/or PR+, HER2+ (or HER2− with high Ki67). About 6-17% of breast cancers are luminal B. Women with luminal B tumors are often diagnosed at a younger age than those with luminal A tumors. Compared to luminal A tumors, luminal B tumors also tend to have factors that lead to a poorer prognosis including: poorer tumor grade; larger tumor size; and p53 gene mutations.

[1337] In some embodiments, the breast cancer is ductal carcinoma in situ (intraductal carcinoma), lobular carcinoma in situ, invasive (or infiltrating) ductal carcinoma, invasive (or infiltrating) lobular carcinoma, inflammatory breast cancer, paget disease of the nipple, phyllodes tumor, angiosarcoma or invasive breast carcinoma. In some embodiments, the invasive breast carcinoma is further categorized into subtypes. In some embodiments, the subtypes include adenoid cystic (or adenocystic) carcinoma, low-grade adenosquamous carcinoma, medullary carcinoma, mucinous (or colloid) carcinoma, papillary carcinoma, tubular carcinoma, metaplastic carcinoma, micropapillary carcinoma or mixed carcinoma.

[1338] In some embodiments, the breast cancer is classified according to stages or how far the tumor cells have spread within the breast tissues and to other portions of the body. There are five stages of breast cancer, Stage 0-IV. The method of treating cancer described herein may be used to treat patients with breast cancer classified as Stage 0-Stage IV.

[1339] Stage 0 breast cancer refers to non-invasive breast cancers or that there are no evidence of cancer cells or abnormal non-cancerous cells breaking out of the origin site. Stage I breast cancer refers to invasive breast cancer in which the cancer cells have invaded into surrounding tissues. Stage I is subclassified into Stage IA and IB, in which Stage IA describes tumor measures up to 2 cm with no spread of cancer cells. Stage IB describes absence of tumor in breast but have small lumps of cancer cells between 0.2 mm to 2 mm within the lymph nodes. Stage II breast cancer is further subdivided into Stage IIA and IIB. Stage IIA describes tumor between 2 cm to 5 cm in breast only, or absence of tumor in breast but with cancer between 2 mm to 2 cm in axillary lymph nodes. Stage IIB describes tumor larger than 5 cm in breast only, or tumor between 2 cm to 5 cm in breast with presence of small tumors from 0.2 mm to 2 mm in axillary lymph nodes. Stage III breast cancer is further subdivided into Stage IIIA, IIIB, and IIIC. Stage IIIA describes absence of tumor or tumor greater than 5 cm in breast with small tumors in 4-9 axillary lymph nodes or small tumors 0.2 mm-2 mm in size in axillary lymph nodes. Stage IIIB describes tumor spreading into the chest wall or skin of the breast causing swelling or ulcer and with presence of tumor in up to 9 axillary lymph nodes. Inflammatory breast cancer is also considered as Stage IIIB. Stage IIIC describes absence of tumor or tumor spreading into the chest wall or to the skin of the breast, with tumor present in 10 or more axillary lymph nodes. Stage IV breast cancer refers to invasive breast cancer that has metastasized into the lymph nodes and other portions of the body.

[1340] In some embodiments, a method of treating a disease associated with HER2 over-expression in a subject in need thereof may comprise the steps of: (1) generating and/or selecting an anti-HER2 antibody molecule; (2) producing an AAV particle comprising a genetic element that comprises a nucleic acid comprising a transgene encoding an anti-HER2 antibody molecule of (1); and (3) administering the AAV particle (or pharmaceutical composition thereof) to the subject.

[1341] In some embodiments, the methods of treating a disease associated with HER2 over-expression herein may be used as adjuvant treatment. “Adjuvant treatment” is taken to mean a therapy of a cancer patient immediately following an initial non chemotherapeutical therapy, e.g. surgery, or radiation. In general, the purpose of an adjuvant therapy is to provide a significantly smaller risk of recurrences compared without the adjuvant therapy. For example, the subjects may have surgery or radiation therapy, after which they received treatment using the methods described herein. In some embodiments, the AAV particle herein may be administered to a subject concurrently with, or post a surgical resection of a HER2/neu-positive solid tumor. The administration may occur at the site of surgical resection (e.g., into a resection void) of a HER2/neu-positive solid tumor in the subject, alternatively, the administration may occur in the area around a site of surgical resection of a HER2/neu-positive solid tumor, e.g., the margins of the tumor, in the subject. Additionally, the AAV particle herein may be administered concurrently with, or post a radiation treatment (e.g., radiotherapy) of a HER2/neu-positive solid tumor.

[1342] The present disclosure provides a method for administering to a subject in need thereof, e.g., a human subject, a therapeutically effective amount of an AAV particle or a plurality of AAV particles described herein to prevent slow, stop, or reverse disease progression.

[1343] In certain embodiments, the progression of the disease (e.g., cancer) may be assessed by Response Evaluation Criteria in Solid Tumors (RECIST 1.1) (see Thereasse P., et al. New Guidelines to Evaluate the Response to Treatment in Solid Tumors. J. of the National Cancer Institute; 2000; (92) 205-216 and Eisenhauer E. A., Therasse P., Bogaerts J., et al. New response evaluation criteria in solid tumours: Revised RECIST guideline (version 1.1). European J. Cancer; 2009; (45) 228-247). Overall responses for all possible combinations of tumor responses in target and non-target lesions with or without the appearance of new lesions are as follows:

TABLE 29
Response Evaluation Criteria in Solid Tumors (RECIST 1.1)

| Target | Non-target | New | Overall |
|---|---|---|---|
| lesions | lesions | lesions | response |
| CR | CR | No | CR |
| CR | Incomplete response/SD | No | PR |
| PR | Non-PD | No | PR |
| SD | Non-PD | No | SD |
| PL | Any | Yes or no | PD |
| Any | PD | Yes or no | PD |
| Any | Any | Yes | PD |

CR = complete response; PR = partial response; SD = stable disease; and PD = progressive disease.

[1344] With respect to the evaluation of target lesions, complete response (CR) is the disappearance of all target lesions, partial response (PR) is at least a 30% decrease in the sum of the longest diameter of target lesions, taking as reference the baseline sum longest diameter, progressive disease (PD) is at least a 20% increase in the sum of the longest diameter of target lesions, taking as reference the smallest sum longest diameter recorded since the treatment started or the appearance of one or more new lesions and stable disease (SD) is neither sufficient shrinkage to qualify for partial response nor sufficient increase to qualify for progressive disease, taking as reference the smallest sum longest diameter since the treatment started.

[1345] With respect to the evaluation of non-target lesions, complete response (CR) is the disappearance of all non-target lesions and normalization of tumor marker level; incomplete response/stable disease (SD) is the persistence of one or more non-target lesion(s) and/or the maintenance of tumor marker level above the normal limits, and progressive disease (PD) is the appearance of one or more new lesions and/or unequivocal progression of existing non-target lesions.

[1346] In some embodiments, the subject may achieve CNS progression free survival as indicated in the RANO-BM criteria (Response Assessment in Neuro-Oncology Brain Metastases).

[1347] In some embodiments, the subject being treated with the AAV particles herein has experienced metastatic HER2+ breast cancer leptomeningeal spread to the central nervous system. In some embodiments, the AAV particles are administered IV to subjects experiencing metastatic HER2+ breast cancer leptomeningeal spread to the central nervous system.

[1348] In some embodiments, the progression of the disorder and/or disease associated with HER2 over-expression is delayed. The delaying of progression means to defer, hinder, slow, retard, stabilize, and/or postpone development of the disease or disorder (e.g., a HER2-positive cancer, e.g., a HER2-positive breast cancer or a HER2-positive metastatic cancer). This delay can be of varying lengths of time, depending on the history of the disease and/or individual being treated. As is evident to one skilled in the art, a sufficient or significant delay can, in effect, encompass prevention, in that the individual does not develop the disease. For example, a late stage cancer, such as development of metastasis, may be delayed.

[1349] In some embodiments, the subject being treated for a disorder and/or disease associated with HER2 over-expression achieves a partial response. In some embodiments, the subject achieves a complete response. In some embodiments, the subject achieves progression free survival for a period of about 1 month, 2 months, 3 months. 4, months, 6 months, 7 months, 8 months, 9 months, 1 year, about 2 years, or about 3 years. In some embodiments, the subject achieves overall survival of about 1 year, about 2 years, about 3 years, about 4 years, about 5 years, 6 years, about 7 years, about 8 years, about 9 years, 10 years, about 15 years, or about 20 years.

[1350] In some embodiments, the disease associated with HER2 over-expression is a metastatic brain cancer. As another non-limiting example, disease progression may be measured by a change in the pathological features of the brain, CSF or other tissues of the subject, such as, but not limited to a decrease in the level of HER2 over-expressing cells or lesions. In some embodiments, the size of the lesion is decreased. In some embodiments, the lesions decrease in size, number, density, or a combination thereof.

[1351] In some embodiments, the method of treating a disease associated with HER2 over-expression in a subject, is used prophylactically. For prophylactic use, beneficial or desired results include results such as eliminating or reducing the risk, lessening the severity, or delaying the onset of the disease, including biochemical, histological and/or behavioral symptoms of the disease, its complications and intermediate pathological phenotypes presenting during development of the disease. For therapeutic use, beneficial or desired results include clinical results such as decreasing one or more symptoms resulting from the disease, increasing the quality of life of those suffering from the disease, decreasing the dose of other medications required to treat the disease, enhancing effect of another medication such as via targeting, delaying the progression of the disease, and/or prolonging survival. In the case of cancer or tumor, an effective amount of the drug may have the effect in reducing the number of cancer cells (e.g., HER2-positive cancer cells); reducing the tumor size; inhibiting (i.e., slow to some extent or desirably stop) cancer cell infiltration into peripheral organs; inhibit (i.e., slow to some extent and desirably stop) tumor metastasis; inhibiting to some extent tumor growth; and/or relieving to some extent one or more of the symptoms associated with the disorder.

### Combination Applications

[1352] In some embodiments, an AAV particle may be used in combination therapy with an additional therapeutic agent and/or therapy, e.g., an additional therapeutic agent and/or therapy suitable for treatment or prevention of a disease associated with HER2 over-expression. In some embodiments, the therapeutic agent may utilize a therapeutic modality known in the art, e.g., gene silencing or interference (e.g., miRNA, siRNA, RNAi, shRNA), gene editing (e.g., TALEN, CRISPR/Cas9 systems, zinc finger nucleases), and gene, protein or enzyme replacement.

[1353] In some embodiments, the administration of an AAV particle described herein further comprises administration of chemotherapeutic agent, e.g., a cytotoxic chemotherapy pharmaceutical compound. Exemplary cytotoxic chemotherapy pharmaceutical compounds include, but are not limited to, a cyclophosphamide, doxorubicin, prednisolone, an ifosamide, a methotrexate, a substituted nucleotide, a substituted nucleoside, fluorouracil, a mitomycin, adriamycin, vincristine, vindesine, taxol, cisplatin, carboplatin, etoposide, or a combination thereof.

[1354] The AAV particle may be administered in addition to any of the standard treatments of metastatic breast cancer. In some instances, for subject experiencing HER2-positive metastatic breast cancer with brain lesions, the first line treatment can include trastuzumab, pertuzumab, and/or a chemotherapeutic agent. If the subject is unresponsive or unable to be treated with the first line treatment, they may be treated with the second line therapeutics, (e.g., trastuzumab emtansine), or third line therapeutics (e.g., trastuzumab, tucatinib, capecitabine, Fam-trastuzumab deruxtecan-nxki, Lapatanib/capecitabine, Lapatanib, Margetuxumab, a chemotherapeutic agent, Neratanib/capecitabine). The AAV particles of the present invention may be used with any of the first, second, or third line therapeutics. Additionally, the AAV particles of the present invention may be administered to a subject who has been unresponsive to the prior lines of treatment. In some embodiments, the subject has experienced refractory HER2-positive cancer.

[1355] In some embodiments, the administration of the AAV particle described herein further comprises administration of a non-vectorized therapeutic antibody and/or chemotherapeutic agent. For example, the AAV particles may be administered with trastuzumab, pertuzumab, a chemotherapeutic agent, or a combination thereof. Additionally, the administration may include trastuzumab emtansine; and/or trastuzumab, tucatinib, capecitabine, Fam-trastuzumab deruxtecan-nxki, Lapatanib/capecitabine, Lapatanib, Margetuximab, a chemotherapeutic agent, Neratanib/capecitabine, or a combination thereof.

[1356] In some embodiments, administration of an AAV particle described herein further comprises administration of an additional therapeutic agent and/or therapy suitable for treatment or prevention of a disease or disorder associated with HER2 over expression (e.g., cancer). In some embodiments, the additional therapeutic agent and/or therapy comprises a checkpoint inhibitor. In an embodiment, the checkpoint inhibitor is a biologic therapeutic or a small molecule. The checkpoint inhibitor can be a monoclonal antibody, a humanized antibody, a fully human antibody, a fusion protein or a combination thereof. The checkpoint inhibitor may inhibit a checkpoint protein selected from CTLA-4, PD-L1, PD-L2, PD1, B7-H3, B7-H4, BTLA, HVEM, TIM3, GAL9, LAG3, VISTA, KIR, 2B4, CD160, CGEN-15049, CHK 1, CHK2, A2aR, B-7 family ligands and combination thereof.

[1357] In some embodiments, any of the treatment regimens described herein include administration of a PD-1 axis binding antagonist (e.g., a PD-L1 binding antagonist, a PD-1 binding antagonist, or a PD-L2 binding antagonist). The PD-L1 binding antagonist may be an anti-PD-L1 antibody including, but not limited to MPDL3280A (atezolizumab), YW243.55.S70, MDX-1 105, and MEDI4736 (durvalumab), and MSB0010718C (avelumab). Antibody YW243.55. S70 is an anti-PD-L1 described in PCT Pub. No. WO 2010/077634, MDX-1 105, also known as BMS-936559, is an anti-PD-L1 antibody described in PCT Pub. No. WO 2007/005874, MEDI4736 (durvalumab) is an anti-PD-L1 monoclonal antibody described in PCT Pub. No. WO 2011/066389 and U.S. Pub. No. 2013/034559. Examples of anti-PD-L1 antibodies useful for the methods of this invention, and methods for making thereof are described in PCT Pub. Nos. WO 2010/077634, WO 2007/005874, and WO 2011/066389, and also in U.S. Pat. No. 8,217,149, and U.S. Pub. No. 2013/034559, which are incorporated herein by reference.

[1358] In some embodiments, the PD-1 binding antagonist is an anti-PD-1 antibody, such as an anti-PD-1 antibody selected from the group consisting of MDX-1 106 (nivolumab), MK-3475 (pembrolizumab), MEDI-0680 (AMP-514), PDR001, REGN2810, and BGB-108, MDX-1 1 06, also known as MDX-1 106-04, ONO-4538, BMS-936558, or nivolumab, is an anti-PD-1 antibody described in PCT Pub. No. WO 2006/121168, MK-3475, also known as pembrolizumab or lambrolizumab, is an anti-PD-1 antibody described in PCT Pub. No. WO 2009/114335. In other instances, the PD-1 binding antagonist is an immunoadhesin (e.g., an immunoadhesin comprising an extracellular or PD-1 binding portion of PD-L1 or PD-L2 fused to a constant region (e.g., an Fc region of an immunoglobulin sequence). In other instances, the PD-1 binding antagonist is AMP-224, AMP-224, also known as B7-DCIg, is a PD-L2-Fc fusion soluble receptor described in PCT Pub. Nos. WO 2010/027827 and WO 2011/066342.

[1359] In other instances, the PD-L2 binding antagonist is an anti-PD-L2 antibody (e.g., a human, a humanized, or a chimeric anti-PD-L2 antibody). In some instances, the PD-L2 binding antagonist is an immunoadhesin.

[1360] In a further embodiment, an additional therapeutic agent is an antibody-drug conjugate (ADC). In one embodiment, a AAV particle described herein is co-administered with an ADC selected from an anti-CD79b antibody drug conjugate (such as anti-CD79b-MC-vc-PAB-MMAE or the anti-CD79b antibody drug conjugate described in any one of U.S. Pat. No. 8,088,378 and/or US 2014/0030280, or polatuzumab vedotin).

[1361] In some instances, the additional therapy includes an alkylating agent. In one instance, the alkylating agent is 4-[5-[bis(2-chloroethyl)amino]-1-methylbenzimidazol-2-yl]butanoic acid and salts thereof. In one instance, the alkylating agent is bendamustine.

[1362] In some instances, the additional therapy comprises a BCL-2 inhibitor. In one embodiment, the BCL-2 inhibitor is 4-(4-{[2-(4-chlorophenyl)-4,4-dimethylcyclohex-1-en-1-yl]methyl}piperazin-1-yl)-N-({3-nitro-4-[(tetrahydro-2H-pyran-4-ylmethyl)amino]phenyl}sulfonyl)-2-(1H-pyrrolo[2,3-b]pyridin-5-yloxy)benzamide and salts thereof. In one instance, the BCL-2 inhibitor is venetoclax (CAS #: 1257044-40-8).

[1363] In some instances, the additional therapy comprises a phosphoinositide 3-kinase (PI3K) inhibitor. In one instance, the PI3K inhibitor inhibits delta isoform PI3K (i.e., P1 10d). In some instances, the PI3K inhibitor is 5-Fluoro-3-phenyl-2-[(1S)-1-(7H-purin-6-ylamino)propyl]-4(3H)-quinazolinone and salts thereof. In some instances, the PI3K inhibitor is idelalisib (CAS #: 870281-82-6). In one instance, the PI3K inhibitor inhibits alpha and delta isoforms of PI3K. In some instances, the PI3K inhibitor is 2-{3-[2-(1-isopropyl-3-methyl-1H-1,2-4-triazol-5-yl)-5,6-dihydrobenzo[f]imidazo[1,2-d][1,4]oxazepin-9-yl]-1H-pyrazol-1-yl}-2-methylpropanamide and salts thereof.

[1364] In a further aspect of the invention, the additional therapy comprises a Bruton's tyrosine kinase (BTK) inhibitor. In one instance, the BTK inhibitor is 1-[(3R)-3-[4-Amino-3-(4-phenoxyphenyl)-1H-pyrazolo[3,4-d]pyrimidin-1-yl]piperidin-1-yl]prop-2-en-1-one and salts thereof. In one instance, the BTK inhibitor is ibrutinib (CAS #: 936563-96-1).

[1365] In some instances, the additional therapy comprises thalidomide or a derivative thereof. In one instance, the thalidomide or a derivative thereof is (RS)-3-(4-amino-1-oxo-1,3-dihydro-2H-isoindol-2-yl)piperidine-2,6-dione and salts thereof. In one instance, the thalidomide or a derivative thereof is lendalidomide (CAS #: 191 732-72-6).

[1366] In one instance, the additional therapeutic agent is a corticosteroid, which can be administered as a pre-treatment prior to (e.g., about 1 hour prior to) administration of the AAV particle described herein. Corticosteroid premedication can include administration of dexamethasone or methylprednisolone. Additionally or alternatively, the treatment regimens described herein may include administration of (e.g., pre-treatment with) acetaminophen, paracetamol, or diphenhydramine.

[1367] In some embodiments, an IL-6R antagonist, such as tocilizumab (ACTEMRA®/RoACTEMRA®) may be administered, e.g., if necessary to manage a cytokine release syndrome (CRS) event. In particular embodiments, an IL-6R antagonist (e.g., tocilizumab) may be administered intravenously, e.g., at a dose of 1 mg/kg to 25 mg/kg (e.g., from 5 mg/kg to 10 mg/kg, e.g., about 8 mg/kg), as necessary.

[1368] In some embodiments, in addition to the AAV particle described herein, the subject is administered supportive care, for example, pain medication for headaches, treatment for infusion-related reactions (IRRs), and prophylaxis for infusion-related reactions. Symptoms for IRRs include, for example, flushing, alterations in heart rate and blood pressure, dyspnea, bronchospasm, back pain, fever, urticaria, edema, nausea, and rashes. Exemplary treatments for an IRR include, but are not limited to acetaminophen, IV hydration, diphenhydramine, histamine₂ blockers (e.g., famotidine), and corticosteroids.

### VI. KITS AND DEVICES

### Kits

[1369] In some embodiments, the disclosure provides a kit for conveniently and/or effectively carrying out methods of the present disclosure. In some embodiments, a kit comprises a sufficient amount and/or number of components to perform multiple treatments of a subject(s) and/or to perform multiple experiments.

[1370] In some embodiments, an AAV particle described herein may be comprised in a kit. In some embodiments, a kit may further include reagents and/or instructions for creating and/or synthesizing compounds and/or compositions of the present disclosure. In some embodiments, a kit may also comprise one or more buffers. In some embodiments, a kit may comprise a component for making a protein or nucleic acid array or library and thus, may include, for example, a solid support.

[1371] In some embodiments, a kit component may be packaged either in aqueous media or in lyophilized form. In some embodiments, a container used in a kit described herein comprises a vial, test tube, flask, bottle, syringe, wherein a component may be placed, and/or suitably aliquoted. In some embodiments, a kit may comprise one or more components, e.g., labeling reagent and label may be packaged together. In some embodiments, a kit may also contain a second, a third or an additional container into which additional components may be separately placed. In some embodiments, a kit may also comprise second container for containing sterile, pharmaceutically acceptable buffers and/or other diluents. In some embodiments, various combinations of components may be comprised in one or more vials. In some embodiments, a kit of the present disclosure may also include means for containing a compound and/or composition of the present disclosure, e.g., a protein, nucleic acid, and any other reagent container in close confinement for commercial sale. Such a container may include injection or blow-molded plastic containers into which desired vials are retained.

[1372] In some embodiments, kit components are provided in one and/or more liquid solutions. In some embodiments, a liquid solution is an aqueous solutions. In some embodiments, the aqueous solution comprises a sterile aqueous solution. In some embodiments, a kit components may be provided as a dried powder. In some embodiments, when a reagent and/or a component are provided as a dry powder, such a powder may be reconstituted by the addition of suitable volumes of solvent. In some embodiments, a solvent may also be provided in another container. In some embodiments, a labeling dye is provided as a dried powder. In some embodiments, at least 10, 20, 30, 40, 50, 60, 70, 80, 90, 100, 120, 120, 130, 140, 150, 160, 170, 180, 190, 200, 300, 400, 500, 600, 700, 800, 900, 1000 micrograms of a dried dye are provided in a kit described herein. In such embodiments, a dye may then be resuspended in any suitable solvent, such as DMSO.

[1373] In some embodiments, a kits may include instructions for use the kit components as well the use of any other reagent not included in the kit. In some embodiments, the instructions may include variations that may be implemented.

### Devices

[1374] In some embodiments, an AAV particle may delivered to a subject using a device to deliver the AAV particle and a head fixation assembly. In some embodiments, the head fixation assembly may be, but is not limited to, any of the head fixation assemblies sold by MRI interventions. As a non-limiting example, the head fixation assembly may be any of the assemblies described in U.S. Pat. Nos. 8,099,150, 8,548,569, and 9,031,636 and International Patent Publication Nos. WO201108495 and WO2014014585, the contents of each of which are incorporated by reference in their entireties. In some embodiments, A head fixation assembly may be used in combination with an MRI compatible drill such as, but not limited to, the MRI compatible drills described in International Patent Publication No. WO2013181008 and US Patent Publication No. US20130325012, the contents of which are herein incorporated by reference in its entirety.

[1375] In some embodiments, an AAV particle may be delivered using a method, system and/or computer program for positioning apparatus to a target point on a subject to deliver the AAV particle. As a non-limiting example, the method, system and/or computer program may be the methods, systems and/or computer programs described in U.S. Pat. No. 8,340,743, the contents of which are herein incorporated by reference in its entirety. In some embodiments, the method may include: determining a target point in the body and a reference point, wherein the target point and the reference point define a planned trajectory line (PTL) extending through each; determining a visualization plane, wherein the PTL intersects the visualization plane at a sighting point; mounting the guide device relative to the body to move with respect to the PTL, wherein the guide device does not intersect the visualization plane; determining a point of intersection (GPP) between the guide axis and the visualization plane; and aligning the GPP with the sighting point in the visualization plane.

[1376] In some embodiments, an AAV particle may be delivered to a subject using a convention-enhanced delivery device. Non-limiting examples of targeted delivery of drugs using convection are described in US Patent Publication Nos. US20100217228, US20130035574, and US 20130035660 and International Patent Publication No. WO2013019830 and WO2008144585, the contents of each of which are herein incorporated by reference in their entireties.

[1377] In some embodiments, a subject may be imaged prior to, during and/or after delivery of an AAV particle. The imaging method may be a method known in the art and/or described herein, such as but not limited to, magnetic resonance imaging (MRI). As a non-limiting example, imaging may be used to assess therapeutic effect. As another non-limiting example, imaging may be used for assisted delivery of AAV particles. In some embodiments, an AAV particle may be delivered intraparenchymal to a subject and used for intra-operative MRI during surgery to visualize delivery.

[1378] In some embodiments, an AAV particle may be delivered using an MRI-guided device. Non-limiting examples of MRI-guided devices are described in U.S. Pat. Nos. 9,055,884, 9,042,958, 8,886,288, 8,768,433, 8,396,532, 8,369,930, 8,374,677, and 8,175,677 and US Patent Application No. US20140024927 the contents of each of which are herein incorporated by reference in their entireties. As a non-limiting example, the MRI-guided device may be able to provide data in real time such as those described in U.S. Pat. Nos. 8,886,288 and 8,768,433, the contents of each of which is herein incorporated by reference in its entirety. As another non-limiting example, the MRI-guided device or system may be used with a targeting cannula such as the systems described in U.S. Pat. Nos. 8,175,677 and 8,374,677, the contents of each of which are herein incorporated by reference in their entireties. As yet another non-limiting example, the MRI-guided device includes a trajectory guide frame for guiding an interventional device as described, for example, in U.S. Pat. No. 9,055,884 and US Patent Application No. US20140024927, the contents of each of which are herein incorporated by reference in their entireties.

[1379] In some embodiments, an AAV particle may be delivered using an MRI-compatible tip assembly. Non-limiting examples of MRI-compatible tip assemblies are described in US Patent Publication No. US20140275980, the contents of which is herein incorporated by reference in its entirety.

[1380] In some embodiments, an AAV particle may be delivered using a cannula which is MRI-compatible. Non-limiting examples of MRI-compatible cannulas include those taught in International Patent Publication No. WO2011130107, the contents of which are herein incorporated by reference in its entirety.

[1381] In some embodiments, an AAV particle may be delivered using a catheter which is MRI-compatible. Non-limiting examples of MRI-compatible catheters include those taught in International Patent Publication No. WO2012116265, U.S. Pat. No. 8,825,133 and US Patent Publication No. US20140024909, the contents of each of which are herein incorporated by reference in their entireties.

[1382] In some embodiments, an AAV particle may be delivered using a device with an elongated tubular body and a diaphragm as described in US Patent Publication Nos. US20140276582 and US20140276614, the contents of each of which are herein incorporated by reference in their entireties.

[1383] In some embodiments, an AAV particle may be delivered using an MRI compatible localization and/or guidance system such as, but not limited to, those described in US Patent Publication Nos. US20150223905 and US20150230871, the contents of each of which are herein incorporated by reference in their entireties. As a non-limiting example, the MRI compatible localization and/or guidance systems may comprise a mount adapted for fixation to a patient, a targeting cannula with a lumen configured to attach to the mount so as to be able to controllably translate in at least three dimensions, and an elongate probe configured to snugly advance via slide and retract in the targeting cannula lumen, the elongate probe comprising at least one of a stimulation or recording electrode.

[1384] In some embodiments, an AAV particle may be delivered to a subject using a trajectory frame as described in US Patent Publication Nos. US20150031982 and US20140066750 and International Patent Publication Nos. WO2015057807 and WO2014039481, the contents of each of which are herein incorporated by reference in their entireties.

[1385] In some embodiments, an AAV particle may be delivered to a subject using a gene gun.

### VII. EXAMPLES

### Example 1. Generation of Anti-HER2 Monospecific Antibody Molecules

[1386] Genetic element constructs were designed for AAV delivery of anti-HER2 antibodies. The nucleotide sequences from 5′ ITR to 3′ ITR of the genetic element constructs that comprise a transgene encoding a monospecific HER2 antibody molecule are provided as HER-04, HER-05, HER-10, HER-42, HER-43, HER-46, HER-47, HER-53, HER-57, HER-62, HER-75, HER-88, HER-89, HER-90, HER-91, and HER-92 herein, which are SEQ ID NOs: 5163, 5170, 5164, 5166, 5185, 5186, 5167, 5168, 5187, 5188, 5190, 6500, 6501, 6502, 6503, and 6504, respectively. These constructs are also summarized in Table 6, as well as Tables 68, 17, 18, 19, 24 and 26.

[1387] Each of these genetic element constructs comprise a nucleic acid comprising a transgene encoding an antibody molecule that binds to HER2. The transgene was designed to comprise a nucleotide sequence encoding an antibody heavy chain signal sequence (SEQ ID NO:5157), a nucleotide sequence encoding an antibody heavy chain variable region (VH) (SEQ ID NO: 5002, 5171, 5015, 5070, 5191, 5223, 5089, 5109, 5253, 5257, 5261, 6512, 6517, 6522, 6527, or 6532), a nucleotide sequence encoding antibody heavy chain constant region (SEQ ID NO: 5003, 5011, 5017, 5025, 5211, 5213, 5029, or 5219), a nucleotide sequence encoding a linker region, a nucleotide sequence encoding an antibody light chain signal sequence (SEQ ID NO: 5159), a nucleotide sequence encoding an antibody light chain variable region (VL) (SEQ ID NO: 5005, 5175, 5019, 5085, 5195, 5227, 5093, 5113, 5255, 5259, or 5265), and a nucleotide sequence encoding an antibody light chain constant region (SEQ ID NO: 5007, 5021, 5277, 5279, or 5221). The linker region was a T2A linker (SEQ ID NO: 1726), which was flanked by a furin cleavage site (SEQ ID NO: 1724) at the 5′ end of the T2A linker. Alternatively, the linker region for HER-57 and HER-62 was, from 5′ to 3′, a series of G4S (SEQ ID NO: 4535) linkers (SEQ ID NOS: 6597, 5161, and 5162).

[1388] The encoded antibodies of HER-04, HER-05, HER-10, HER-42, HER-43, HER-46, HER-47, HER-53, HER-57, HER-62, HER-75, HER-88, HER-89, HER-90, HER-91, and HER-92 comprise a heavy chain signal sequence (SEQ ID NO:5158), an antibody heavy chain variable region (VH) (SEQ ID NO: 5002, 5172, 5016, 5071, 5192, 5224, 5090, 5110, 5254, 5258, 5262, 6511, 6516, 6521, 6526, or 6531), an antibody heavy chain constant region (SEQ ID NO: 5004, 5012, 5018, 5026, 5212, 5214, 5030, or 5220), an antibody light chain signal sequence (SEQ ID NO: 5160), an antibody light chain variable region (VL) (SEQ ID NO: 5006, 5176, 5020, 5086, 5196, 5228, 5094, 5114, 5256, 5260, or 5266), and an antibody light chain constant region (SEQ ID NO: 5008, 5022, 5278, 5280, or 5222).

### Example 2. Codon Optimization of Sequences Encoding an Anti-HER2 Monospecific Antibody Molecule

[1389] Unmethylated CpG dinucleotide-based motifs in AAV transgenes are known to stimulate innate immune responses by binding and activating Toll-Like receptor (TLR9) signaling pathway. Anti-HER2 monospecific antibody molecule HER-53 was further codon optimized to eliminate a total of 87 dinucleotides in the transgene. The expression of the resulting codon optimized HER-75 was compared to HER-53 and HER-77 in HEK expi293 cells. Conditioned media were taken 2, 3, and 7 days post-transfection and subject to IgG quantification with a Biacore 8K system. FIGS. 1A and 1B show the comparison of the expression of the three monospecific antibody molecules in HEK cells.

[1390] HEK-Blue human TLR9 (hTLR9) cells (invivogen hkb-htlr9) overexpress hTLR9 gene. They also express a secreted embryonic alkaline phosphatase (SEAP) reporter gene under the control of an NF-kB inducible promoter. Levels of SEAP in the culture supernatant reflect the level of TLR9 induced NF-kB signaling. HEK-Blue hTLR9 cells were used to study potential immunogenicity of HER-53 and HER-75 transgenes. Briefly, HER-53 and HER-75 transgene fragments were cut and separated from their vector parts with restriction enzymes AgeI/XhoI and 1.2% agarose gel. Transgene DNA fragments were recovered from agarose gel and transfected to HEK-Blue hTLR9 cells with FuGENE HD (Promega E2311). Levels of SEAP in the conditioned media 5 days post-transfection were measured with QUANTI-Blue solution (Invivogen: rep-qbs) (FIG. 1C).

### Example 3. Generation of ITR-ITR Constructs for the Expression of Anti-HER2 Monospecific Antibody Molecules

[1391] In designing the genetic element constructs for expression of monospecific HER2 antibody molecules (HER-04, HER-05, HER-10, HER-42, HER-43, HER-46, HER-47, HER-53, HER-57, HER-62, HER-75, HER-69, HER-88, HER-89, HER-90, HER-91, and HER-92), several promoters were selected. The ubiquitous CB promoter (SEQ ID NO: 6566) was used for HER-04 (SEQ ID NO: 5163), HER-05 (SEQ ID NO: 5170), HER-43 (SEQ ID NO: 5185), HER-46 (SEQ ID NO: 5186), HER-62 (SEQ ID NO: 5188), HER-75 (SEQ ID NO: 5190), HER-88 (SEQ ID NO: 6500), HER-89 (SEQ ID NO: 6501), HER-90 (SEQ ID NO: 6502), HER-91 (SEQ ID NO: 6503), and HER-92 (SEQ ID NO: 6504). The ubiquitous CB promoter (SEQ ID NO: 6566) further comprising a CMV(IE) promoter (SEQ ID NO: 6594), was used for HER-10 (SEQ ID NO: 5164), HER-42 (SEQ ID NO:5166), HER-47 (SEQ ID NO:5167), HER-53 (SEQ ID NO: 5168), and HER-57 (SEQ ID NO: 5187). The astrocyte targeting GFAP promoter (SEQ ID NO: 6568) was used for HER-69 (SEQ ID NO: 5169).

[1392] The HER-04, HER-05, HER-43, HER-46, HER-57, HER-62, HER-75, HER-88, HER-89, HER-90, HER-91, and HER-92 genetic elements further comprised an ie exon 1 region (SEQ ID NO: 6573), an ie intron 1 region (SEQ ID NO: 6578), a second human beta-globin intron region (SEQ ID NO: 6580), and a human beta-globin exon region (SEQ ID NO: 6576). The HER-10, HER-42, HER-47, and HER-53 genetic elements comprising a CB promoter, as well as the HER-69 genetic elements comprising a GFAP promoter, further comprised human beta-globin intron region (SEQ ID NO: 6595).

[1393] The 5′ ITR (SEQ ID NO: 6559), the polyadenylation sequence (SEQ ID NO: 6590), and the 3′ ITR (SEQ ID NO: 6561) were the same across all HER-04, HER-05, HER-10, HER-42, HER-43, HER-46, HER-47, HER-53, HER-57, HER-62, HER-75, HER-69, HER-88, HER-89, HER-90, HER-91, and HER-92 genetic element constructs designed for the expression of an anti-HER2 antibody molecule.

[1394] All sixteen genetic element constructs and their component parts are summarized in Tables 6, 68, 17, 18, 19, 23, 24, and 26 above.

### Expression of Anti-HER2 Antibodies—Validation of Cell Lines

[1395] HER2 expression in a panel of cancer cell lines was analyzed by flow cytometry. Briefly, the cells were dissociated using StemPro Accutase (Gibco A1110501), and the pelleted cells were washed with FACS Buffer (1-2% BSA in PBS). For cell surface HER2 expression, the cells were incubated with a PE-conjugated mouse anti-HER2 antibody (BD 340879) or the appropriate isotype control antibody (BD 559320) for 30 minutes on ice in the dark. Following antibody incubation, the cells were washed twice with FACS Buffer and resuspended in cold FACS Buffer. The cells were passed through 35 μm cell strainers prior to analysis on a BD Accuri C6 flow cytometer.

[1396] HER2 expression was found to be elevated in the following cell lines compared to the negative control U87-MG (glioblastoma) cell line: BT-474 (breast), SK-BR-3 (breast), MDA-MB-361-luc (breast, brain metastasis), and SK-OV-3 (ovarian).

### Expression of Anti-HER2 Antibodies in Cancer Cells

[1397] HER2 antibody secretion by the SK-BR-3 breast cancer cell line three days post-transfection with the HER-04, HER-05, HER-10, and HER-15 genetic element constructs was quantified via an AlphaLISA assay for human IgG1. Prior to reverse transfection with Lipofectamine LTX, a 24-well plate was coated with 10 μg/mL of fibronectin (Sigma-Aldrich F1141). SK-BR-3 cells were plated at 200,000 cells/well along with 500 ng of plasmid DNA complexed with Lipofectamine LTX and PLUS Reagent. The culture medium was replaced with serum-free Opti-MEM one day post-transfection. Three days post-transfection with the HER-04, HER-05, HER-10, and HER-15 genetic element constructs, the media was collected from the cells and analyzed using the human IgG1 AlphaLISA Detection Kit (Perkin Elmer AL307) following manufacturer protocols. Briefly, 5 μL of culture supernatant was added to a white 384-well plate and incubated with AlphaLISA beads in a 50 uL final assay volume. AlphaLISA readings were taken on a PerkinElmer EnVision 2105 Multimode Plate Reader. The standard curve and data interpolation were analyzed in GraphPad Prism using a sigmoidal 4PL fit with 1/Y² data weighting. The concentration of the antibodies expressed by the SK-BR-3 breast cancer cells three days post-transfection in shown in Table 30 below.

TABLE 30
Concentration of human IgG1 by transfected
SK-BR-3 breast cancer cells

| SK-BR-3 Transfection | Human IgG1 (ng/mL) |
|---|---|
| Human IgG1 isotype control antibody | 319.5 |
| HER-04 | 537.0 |
| HER-05 | 428.0 |
| HER-10 | 377.0 |
| HER-15 | 11.0 |

### Expression of Anti-HER2 Antibodies—Western Blot

[1398] Expression of the heavy chains and light chains of HER2 antibody clones produced by the HER-04, HER-05, HER-10, and HER-15 genetic element constructs was evaluated by Western blot. SK-BR-3 cells were reverse transfected with plasmid DNA using Lipofectamine LTX and PLUS Reagent in fibronectin-coated plates. Culture supernatant was replaced with serum-free medium (Opti-MEM or Cancer Cell Line Medium XF, PromoCell C-28077) one day post-transfection. Three days post-transfection, the culture medium was concentrated using centrifugal concentrators (MilliporeSigma) or purified using Protein A agarose (Thermo Scientific 22811) prior to SDS-PAGE using a MES SDS Running Buffer (Invitrogen). Proteins were separated through 4-12% Bis-Tris gels and processed through silver staining (Thermo Scientific 24612), or transferred to nitrocellulose membranes for Western blotting with a fluorophore-conjugated goat anti-human antibody (LI-COR 925-32232) at 1:10,000 dilution. Silver stains were imaged on a Bio-Rad ChemiDoc MP Imaging System, and Western blots were imaged on a LI-COR Odyssey CLx. Secreted HER-04, HER-05, human IgG1 isotype control antibody, HER-10, and HER-15 antibodies from transfected SK-BR-3 breast cancer cells were analyzed by Western blot and silver stain to confirm that the antibodies can fully assemble, and subsequently be reduced to monomeric heavy and light chains. Cells expressing the HER-04, HER-05, and HER-10 antibodies were able to successfully produce the heavy and light chains of the encoded anti-HER2 antibody, as evidenced by bands at 50 kDA and 25 kDa, respectively. HER-15 was poorly expressed/secreted by SK-BR-3 cells.

[1399] Expression of the heavy chains and light chains of HER-10 (control), HER-53, HER-75, HER-88, HER-89, HER-90, HER-91, and HER92 genetic element constructs was evaluated by Western blot as described above. Secreted human IgG1 isotype control antibody, HER-53, HER-75, and heavy chain mutants HER-88, HER-89, HER-90, HER-91, and HER-92 from transfected SK-BR-3 breast cancer cells were analyzed by Western blot and silver stain to confirm that the antibodies can fully assemble, and subsequently be reduced to monomeric heavy and light chains. Cells expressing the antibodies were able to successfully produce the heavy and light chains of the encoded anti-HER2 antibody.

### Example 4. In Vitro Characterization of Anti-HER2 Monospecific Antibody Molecules

### HER2 Binding Affinity Measurement

[1400] Antibody binding to HER2 was analyzed by Biacore 8K (GE Healthcare) surface plasmon resonance instrument (SPR). All reagents used were from GE Healthcare. HBS-EP+ was used as the sample and running buffer and the interaction was measured at 25° C. A CM5 sensor chip was immobilized with anti-human IgG Fc antibody, as per protocol suggested by Human Antibody Capture kit (GE Healthcare). The Anti-HER2 antibodies were diluted to 0.5 μg/ml in HBS-EP+ and were captured by flowing for 120 sec at 10 μl/min to give a final HER2 binding response of less than 200 RU. HER2 ECD (0.625-80 nM, 2-fold dilution) was passed over the captured anti-HER2 antibody at 30 μl/min flow rate, and association and dissociation phases were recorded for 300 and 600 sec, respectively. The sensor chip was regenerated by a 30 sec injection of 3M MgCl₂ at 30 μl/min at the end of each injection cycle. The sensorgrams were fitted to 1:1 binding model (global fit) in the Biacore Insight Evaluation Software to calculate kinetic rate constants and binding affinity value. For anti-HER2 antibodies with FcRn mutations (HER-43, HER-46, and HER-47), antibodies in conditioned media were used. The conditioned media was diluted in HBS-EP+ to achieve a capture level that produced a final HER2 binding response of less than 200 RU.

[1401] The Bonding affinity data is shown in Table 31 below. Binding affinity of the vectorized antibody was found to be comparable to the recombinant antibody, suggesting that vectorization process does not affect the ability of antibody to bind to HER2. The FcRn-binding mutants (HER-43, HER-46, and HER-47) showed a slightly weaker affinity for HER2, and the bispecific antibody, Her-73 showed a stronger HER2 binding affinity.

TABLE 31
Binding affinity to HER2

| | | | |
|---|---|---|---|
| Antibody | K_{D} (nM) | kon (1/Ms) | koff (1/s) |

Recombinant (Naked) Antibody

| | | | |
|---|---|---|---|
| HER-04 | 1.5 | 1.3E+05 | 1.9E−04 |
| HER-05 | 2.7 | 8.7E+04 | 2.3E−04 |
| HER-10 | 1.2 | 1.9E+05 | 2.1E−04 |

Vectorized Antibody

| | | | |
|---|---|---|---|
| HER-04 | 1.7 | 1.3E+05 | 2.2E−04 |
| HER-05 | 2.7 | 8.1E+04 | 2.2E−04 |
| HER-10 | 1.5 | 1.7E+05 | 2.5E−04 |
| HER-15 | 0.3 | 4.3E+05 | 1.2E−04 |
| HER-53 | 1.6 | 1.1E+05 | 1.7E−04 |

FcRn binding mutants

| | | | |
|---|---|---|---|
| HER-43 | 6.2 | 1.1E+05 | 6.8E−04 |
| HER-46 | 3.5 | 1.0E+05 | 3.6E−04 |
| HER-47 | 7.8 | 1.2E+05 | 9.1E−04 |

Bispecific antibody molecule

| | | | |
|---|---|---|---|
| HER-73 | 0.2 | 1.3E+05 | 2.4E−05 |

### Heavy Chain CDR3 Mutant Binding Affinity Measurements

[1402] The antibody binding of the Heavy chain CDR3 mutants (HER-88, HER-89, HER-90, HER-91, HER-92) to HER2 was analyzed by Biacore 8K (GE Healthcare) surface plasmon resonance instrument (SPR) as described above.

TABLE 47
Binding affinity of Heavy CDR3 mutants to HER2

| | HCDR3 | | | | | | | Fit quality parameters | |
|---|---|---|---|---|---|---|---|---|---|
| | Modifications | | | | | | | | chi2/Rmax |
| | (according to | | Kinetic parameters | | | | | Kinetics | (%) (Calc. |
| Construct | Kabat) | Replicate | KD (nM) | ka (1/Ms) | kd (1/s) | KD (M) | Rmax (RU) | Chi² (RU²) | unit) |
| Her53 | D98 M100, | 1 | 1.81 | 1.03E+05 | 1.86E−04 | 1.81E−09 | 88.8 | 0.67 | 0.8% |
| | D101, Y102 | 2 | 1.96 | 1.01E+05 | 1.97E−04 | 1.96E−09 | 89.1 | 0.81 | 0.9% |
| | | Mean | 1.89 | 1.02E+05 | 1.92E−04 | 1.89E−09 | 88.95 | | |
| | | % CV | 5.6 | 1.4 | 4.1 | 5.6 | 0.2 | | |
| Her75 | D98 M100, | 1 | 1.25 | 1.23E+05 | 1.54E−04 | 1.25E−09 | 83.9 | 1.15 | 1.4% |
| | D101, Y102 | 2 | 1.43 | 1.18E+05 | 1.69E−04 | 1.43E−09 | 85.6 | 1.59 | 1.9% |
| | | Mean | 1.34 | 1.21E+05 | 1.62E−04 | 1.34E−09 | 84.75 | | |
| | | % CV | 9.5 | 2.9 | 6.6 | 9.5 | 1.4 | | |
| Her88 | D98W, | 1 | 0.87 | 1.10E+05 | 9.54E−05 | 8.69E−10 | 59.9 | 0.65 | 1.1% |
| | M100F, | 2 | 1.01 | 1.01E+05 | 1.03E−04 | 1.01E−09 | 62.9 | 0.72 | 1.1% |
| | D101A, | Mean | 0.94 | 1.06E+05 | 9.92E−05 | 9.40E−10 | 61.40 | | |
| | Y102L | % CV | 10.6 | 6.0 | 5.4 | 10.6 | 3.5 | | |
| Her89 | D98W, | 1 | 1.35 | 9.90E+04 | 1.34E−04 | 1.35E−09 | 53.7 | 0.84 | 1.6% |
| | M100F, | 2 | 1.49 | 9.70E+04 | 1.45E−04 | 1.49E−09 | 53.4 | 0.73 | 1.4% |
| | D101A | Mean | 1.42 | 9.80E+04 | 1.40E−04 | 1.42E−09 | 53.55 | | |
| | | % CV | 7.0 | 1.4 | 5.6 | 7.0 | 0.4 | | |
| Her90 | D98W, | 1 | 1.46 | 1.15E+05 | 1.68E−04 | 1.46E−09 | 57.6 | 1.00 | 1.7% |
| | M100F, | 2 | 1.58 | 1.08E+05 | 1.71E−04 | 1.58E−09 | 59.5 | 0.83 | 1.4% |
| | Y102L | Mean | 1.52 | 1.12E+05 | 1.70E−04 | 1.52E−09 | 58.55 | | |
| | | % CV | 5.6 | 4.4 | 1.3 | 5.6 | 2.3 | | |
| Her91 | D98W, | 1 | 2.18 | 1.32E+05 | 2.88E−04 | 2.18E−09 | 60.7 | 0.90 | 1.5% |
| | D101A, | 2 | 1.82 | 1.41E+05 | 2.57E−04 | 1.82E−09 | 59.9 | 0.97 | 1.6% |
| | Y102L | Mean | 2.00 | 1.37E+05 | 2.73E−04 | 2.00E−09 | 60.30 | | |
| | | % CV | 12.7 | 4.7 | 8.0 | 12.7 | 0.9 | | |
| Her92 | M100F, | 1 | 1.16 | 1.19E+05 | 1.38E−04 | 1.16E−09 | 73.2 | 1.45 | 2.0% |
| | D101A, | 2 | 1.24 | 1.11E+05 | 1.38E−04 | 1.24E−09 | 75.9 | 0.91 | 1.2% |
| | Y102L | Mean | 1.20 | 1.15E+05 | 1.38E−04 | 1.20E−09 | 74.55 | | |
| | | % CV | 4.7 | 4.9 | 0.0 | 4.7 | 2.6 | | |

### FcRn Binding Affinity Measurement

[1403] Antibody binding to the FcRn receptor at pH 6.0 and 7.4 was analyzed by Biacore 8K (GE Healthcare) surface plasmon resonance instrument (SPR). All reagents used were from GE Healthcare. For the pH 6.0 assay, PBS-P+ buffer was adjusted to pH 6.0 and supplemented with NaCl to a final concentration of 500 mM. For the pH 7.4 assay, PBS-P+ was used. Biotinylated human and mouse FcRn receptor (Acro Biosystems) were captured on a Biotin CAPture chip by injecting 1 μg/ml of FcRn for 30 sec at 10 μl/min. The Anti-HER2 antibody was injected (12-3000 nM, 3-fold dilution) over the captured FcRn in a single cycle kinetics (SCK) mode with an association and dissociation time of 60 and 120 sec, respectively. The sensor chip was regenerated according to manufacturer' instructions. Sensorgrams were fitted to steady-state affinity model for human FcRn and 1:1 model for mouse FcRn to calculate the affinity values.

[1404] At pH 6.0, HER-04 showed an affinity value of K_{D}=299 nM and 49 nM for human and mouse FcRn, respectively, while FcRn binding mutants, HER-43, HER-46, and HER-47 showed no binding to FcRn. At pH 7.4, no binding was observed for all antibodies.

### Ability of Anti-HER2 Antibodies Expressed by SK-BR-3 and Expi293 Cells to Bind HER2

[1405] The ability of the anti-HER2 antibodies expressed by SK-BR-3 and Expi293 cells transfected with the HER-10 genetic element construct to bind HER2 was assessed. SK-BR-3 cells were reverse transfected with plasmid DNA using Lipofectamine LTX and PLUS Reagent in fibronectin-coated flasks. The culture supernatant was replaced with serum-free medium (Opti-MEM) one day post-transfection. Three days post-transfection, the culture medium was concentrated using centrifugal concentrators (MilliporeSigma) and analyzed by Biacore SPR binding to Her2 ECD with data fitted to a 1:1 binding model (global fit). The binding affinity of the HER2 antibody expressed from SK-BR-3 breast cancer cells was comparable to the anti-HER2 antibody expressed from Expi293 cells, with KD values of 0.96 nM and 1.58 nM, respectively, as assessed by Biacore SPR.

### Efficacy Measurement of Constructs—Cell Proliferation Assays

### BT-474 Cell Proliferation Assays

[1406] BT-474 cells were dispensed at 625 cells/well using a Multidrop Combi Reagent Dispenser (Thermo Scientific) into white 384-well plates pre-dispensed with antibody dilutions. A two-fold serial dilution series was prepared for each antibody in sterile polypropylene 96-well plates. Assay plates were covered with Microclime Environmental Lids (Beckman Coulter 0015717) filled with 8 mL of UltraPure Distilled water (Invitrogen 10977-015) to reduce well evaporation. Cell proliferation was measured using the CellTiter-Glo 2.0 assay (Promega G9242) after four days of antibody treatment. Luminescence measurements were taken on an EnVision 2105 Multimode Plate Reader, and data were analyzed in GraphPad Prism using a variable slope (four parameters) fit with 1/Y² data weighting. Edge wells were excluded from analysis. The plots of the cell proliferation assay for the vectorized anti-HER2 antibodies HER-04, HER-05, HER-10, and HER-15 are shown in FIGS. 2A-2D, respectively. The vectorized anti-HER2 antibodies expressed by Expi293 cells performed similar to reference antibodies (Creative Biolabs) in cell growth inhibition assays with BT-474 cells. Additionally, similar cell growth inhibition was observed between the HER-53 antibody with an enhanced Fc region and HER-04 (FIG. 3, Table 49). HER-10 performed better than HER-53 or HER-04 (FIG. 3).

TABLE 49
IC₅₀ and Eₘₐₓ HER-53, HER-04, and HER-10 in BT-474 cells

| Antibody | IC₅₀ (μg/mL) | Eₘₐₓ (%) |
|---|---|---|
| HER-53 | 0.083 | 28.7 |
| HER-04 | 0.058 | 35.1 |
| HER-10 | 0.041 | 38.0 |

### MDA-MB-361-Luc Cell Proliferation Assays

[1407] MDA-MB-361-luc cells were dispensed at 1,788 cells/well using a Multidrop Combi Reagent Dispenser (Thermo Scientific) into white 96-well plates pre-dispensed with antibody dilutions. A two-fold dilution series was prepared for each antibody in sterile polypropylene 96-well plates. Assay plates were covered with Microclime Environmental Lids (Beckman Coulter 0015717) filled with 8 mL of UltraPure Distilled water (Invitrogen 10977-015) to reduce well evaporation. Cell proliferation was measured using the CellTiter-Glo 2.0 assay (Promega G9242) after 13 days of antibody treatment. Luminescence measurements were taken on an EnVision 2105 Multimode Plate Reader, and data were analyzed in GraphPad Prism using a variable slope (four parameters) fit with 1/Y² data weighting. Edge wells were excluded from analysis. Vectorized anti-HER2 antibodies of HER-04, HER-10, and HER15 inhibited cell growth of MDA-MB-361 cells in a dose-dependent manner (FIGS. 4A-4D).

[1408] The above MDA-MB-361-luc cell proliferation assay was repeated using an expanded dose range utilizing a three-fold dilution series of each antibody. The vectorized anti-HER2 antibodies of HER-04, HER-10, HER-15, and HER-53 inhibited cell growth of MDA-MB-361-luc cells in a dose-dependent manner, while human IgG1 isotype control antibody did not (FIGS. 5A-5G, Tables 50 and 51). A similar result was found using high passage cells, p37, for the vectorized HER-10 (FIGS. 6A-6B), which inhibited cell growth of MDA-MB-361-luc cells in a dose-dependent manner.

TABLE 50
IC₅₀ and Eₘₐₓ HER-53 and HER-04 in MDA-MB-361 cells

| Antibody | IC₅₀ (μg/mL) | Eₘₐₓ (%) |
|---|---|---|
| HER-53 | 0.136 | 40.3 |
| HER-04 | 0.077 | 46.5 |

TABLE 51
IC₅₀ and Eₘₐₓ HER-53 and HER-10 in MDA-MB-361 cells

| Antibody | IC₅₀ (μg/mL) | Eₘₐₓ (%) |
|---|---|---|
| HER-53 | 0.162 | 45.5 |
| HER-10 | 0.048 | 56.5 |

### Antibody-Dependent Cellular Cytotoxicity (ADCC)

[1409] The ADCC Reporter Bioassays were run according to manufacturer protocols (Promega G7010/G9790). Briefly, BT-474 target cells were plated in white 96-well plates at 5,000 cells/well and incubated overnight at 37° C. and 5% CO₂. After overnight incubation, the media was replaced with ADCC Assay Buffer, and antibody dilutions were added in a 3-fold serial dilution series. Effector cells were immediately thawed and added to the plates for an Effector:Target cell ratio of 15:1. The plates were incubated at 37° C. and 5% CO₂ for 6 hours. The plates were then equilibrated to room temperature for 15 minutes and Bio-Glo Luciferase Assay Reagent was added. The plates were incubated for 30 minutes at room temperature, and luminescence was measured on a PerkinElmer EnVision 2105 Multimode Plate Reader. Data were analyzed on GraphPad Prism using a variable slope (four parameters) fit with 1/Y² data weighting. HER-10 contains enhancements in the Fc region that promote ADCC activity. The HER-10 ADCC activity was found to be similar to the reference antibody, and was improved over HER-04 in assays employing both the high affinity (FIG. 7A, Table 52) and low affinity variants of the FcgRIIIa receptor (FIG. 7B, Table 53). The Fc enhancements of HER-10 are further highlighted in the low affinity variant assay. HER-53 contains the same Fc region enhancements as HER-10, and ADCC activity is similar between the two antibodies. Both are improved over HER-04 in assays employing both the high affinity (FIG. 8A, Table 54) and low affinity variants of the FcgRIIIa receptor (FIG. 8B, Table 55).

TABLE 52
HER-10 and HER-04 EC₅₀ in BT-474 cells, High Affinity

| Antibody | Eₘₐₓ (ng/mL) |
|---|---|
| HER-10 | 14.8 |
| HER-04 | 42.2 |
| Reference Antibody | 12.9 |

TABLE 53
HER-10 EC₅₀ in BT-474 cells, Low Affinity

| Antibody | Eₘₐₓ (ng/mL) |
|---|---|
| HER-10 | 75.2 |
| Reference Antibody | 114.6 |

TABLE 54
HER-53, HER-10 and HER-04
EC₅₀ in BT-474 cells, High Affinity

| Antibody | Eₘₐₓ (ng/mL) |
|---|---|
| HER-53 | 14.5 |
| HER-10 | 14.8 |
| HER-04 | 52.6 |

TABLE 55
HER-53 and HER-10 EC₅₀ in BT-474 cells, Low Affinity

| Antibody | Eₘₐₓ (ng/mL) |
|---|---|
| HER-53 | 37.1 |
| HER-10 | 35.6 |

Cell Proliferation Assays with Tucatinib

[1410] BT-474 cells were dispensed at 625 cells/well using a Multidrop Combi Reagent Dispenser (Thermo Scientific) into white 384-well plates pre-dispensed with antibody serial dilutions (two-fold) of human IgG1 isotype control antibody, HER-04, HER-10, HER-53, and HER-75 or tucatinib (an antineoplastic HER2 inhibitor) serial dilutions (three-fold). Assay plates were covered with Microclime Environmental Lids (Beckman Coulter 0015717) filled with 8 mL of UltraPure Distilled water (Invitrogen 10977-015) to reduce well evaporation. Cell proliferation was measured using the CellTiter-Glo 2.0 assay (Promega G9242) after four days. Luminescence measurements were taken on an EnVision 2105 Multimode Plate Reader, and data were analyzed in GraphPad Prism using a variable slope (four parameters) fit with 1/Y² data weighting. Edge wells were excluded from analysis. Similar cell growth inhibition was observed between the HER-53 antibody with an enhanced Fc region and HER-04 (FIG. 9A). A comparison between HER-53 and HER-75 is shown in FIG. 9B (see Table 56). Again, similar cell growth inhibition was observed between the HER-53 antibody and HER-75. A similar procedure was followed for testing with SK-BR-3 cells (FIG. 9C, Table 57). Further comparisons were made between HER-08 (control), HER-53, HER-75, and HER-10 utilizing the SK-BR-3 cell line (FIG. 9D, Table 56). HER-10 performed better than HER-53 or HER-04 in BT-474 cells. Tucatinib-treated cells served as positive control for cell growth inhibition.

TABLE 56
IC₅₀ and Eₘₐₓ of HER-53, HER-75, and HER-
10 in BT-474 cells and SK-BR-3 cells

| | BT-474 cells | | SK-BR-3 cells | |
|---|---|---|---|---|
| Antibody | IC₅₀ (μg/mL) | Eₘₐₓ (%) | IC₅₀ (μg/mL) | Eₘₐₓ (%) |
| HER-53 | 0.063 | 42.8 | 0.056 | 39.1 |
| HER-75 | 0.051 | 35.6 | 0.054 | 31.8 |
| HER-10 | 0.054 | 50.5 | 0.055 | 41.0 |

TABLE 57
IC₅₀ and Eₘₐₓ of HER-53, HER-04, and HER-10 in SK-BR-3 cells

| Antibody | IC₅₀ (μg/mL) | Eₘₐₓ (%) |
|---|---|---|
| HER-53 | 0.072 | 41.6 |
| HER-04 | 0.087 | 40.7 |
| HER-10 | 0.063 | 44.6 |

### BT-474 Cell Proliferation Assays—FcRn-Binding Mutants

[1411] BT-474 cells were dispensed at 625 cells/well using a Multidrop Combi Reagent Dispenser (Thermo Scientific) into white 384-well plates pre-dispensed with antibody dilutions. A two-fold serial dilution series was prepared for each antibody (HER-04, human IgG1 isotype control antibody, HER-43, HER-46, and HER-47) in sterile polypropylene 96-well plates. Assay plates were covered with Microclime Environmental Lids (Beckman Coulter 0015717) filled with 8 mL of UltraPure Distilled water (Invitrogen 10977-015) to reduce well evaporation. Cell proliferation was measured using the CellTiter-Glo 2.0 assay (Promega G9242) after four days of antibody treatment. Luminescence measurements were taken on an EnVision 2105 Multimode Plate Reader, and data were analyzed in GraphPad Prism using a variable slope (four parameters) fit with 1/Y² data weighting. Edge wells were excluded from analysis. A similar cell growth inhibition was observed between HER-04 and engineered antibodies containing mutations that abrogate FcRn-binding (HER-43, HER-46, and HER-47) (FIGS. 10A-10B).

### SK-BR-3 and BT-474 Cell Proliferation Assays of HER-57

[1412] SK-BR-3 cells were dispensed at 625 cells/well using a Multidrop Combi Reagent Dispenser (Thermo Scientific) into white 384-well plates pre-dispensed with antibody serial dilutions (two-fold) or tucatinib serial dilutions (three-fold). Assay plates were covered with Microclime Environmental Lids (Beckman Coulter 0015717) filled with 8 mL of UltraPure Distilled water (Invitrogen 10977-015) to reduce well evaporation. Cell proliferation was measured using the CellTiter-Glo 2.0 assay (Promega G9242) after four days. Luminescence measurements were taken on an EnVision 2105 Multimode Plate Reader, and data were analyzed in GraphPad Prism using a variable slope (four parameters) fit with 1/Y² data weighting (FIG. 11). Edge wells were excluded from analysis. SK-BR-3 cells were sensitive to cell growth inhibition by the HER-57 antibody. HER-57, HER-04, and HER-10 all produced a similar cell growth inhibition, with HER-10 having a slightly larger maximal inhibition. Tucatinib-treated cells served as positive control for cell growth inhibition. A similar procedure was followed for testing with BT-474 cells. In contrast to SK-BR-3 cells, BT-474 cells were not sensitive to cell growth inhibition by HER-57.

### SK-BR-3 and BT-474 Cell Proliferation Assays of Heavy CDR3 Mutants

[1413] HER-08 (control), HER-53, HER-75, and HER-88, were analyzed by cell proliferation assays using SK-BR-3 cells, and BT-47 cells as described above. HER-53, HER-75, and HER-88 all produced cell growth inhibition in both SK-BR-3 cells (FIG. 12A and Table 59) and BT-474 cells (FIG. 12B and Table 60). Tucatinib-treated cells served as positive control for cell growth inhibition.

TABLE 59
IC₅₀ and Eₘₐₓ of HER-53, HER-75, and HER-88 in SK-BR-3 cells

| Antibody | IC₅₀ (μg/mL) | Eₘₐₓ (%) |
|---|---|---|
| HER-53 | 0.031 | 28.2 |
| HER-75 | 0.037 | 27.3 |
| HER-88 | 0.036 | 30.3 |

TABLE 60
IC₅₀ and Eₘₐₓ HER-53 and HER-88 in BT-474 cells

| Antibody | IC₅₀ (μg/mL) | Eₘₐₓ (%) |
|---|---|---|
| HER-53 | 0.081 | 32.4 |
| HER-88 | 0.048 | 41.5 |

[1414] Similar testing was done on HER-88, HER-89, HER-90, HER-91, and HER-92. Cell proliferation was measured using the CellTiter-Glo 2.0 assay (Promega G9242) after five days in the BT-474 cell line. Four replicate 384-well plates with 3 wells per point were used. These data are described in Table 48. HER-75 was used as a control to see the effect the CDR3 mutations had on cell proliferation. Similar results were found for HER-75, HER-88, HER-89, HER-90, HER-91, and HER-92.

TABLE 48
Cell Proliferation with HCDR3 mutants

| | IC₅₀ (μg/mL) | | | | | |
|---|---|---|---|---|---|---|
| Antibody | Plate 1 | Plate 2 | Plate 3 | Plate 4 | Average | StDev |
| HER-75 D98, M100, D101, | 0.038 | 0.055 | 0.045 | 0.060 | 0.050 | 0.010 |
| Y102L | | | | | | |
| HER-88 D98W, M100F, D101A, | 0.049 | 0.057 | 0.053 | 0.070 | 0.057 | 0.009 |
| Y102L | | | | | | |
| HER-89 D98W, M100F, D101A | 0.056 | 0.063 | 0.056 | 0.049 | 0.056 | 0.006 |
| HER-90 D98W, M100F, Y102L | 0.058 | 0.052 | 0.069 | 0.067 | 0.062 | 0.008 |
| HER-91 D98W, D101A, Y102L | 0.050 | 0.049 | 0.056 | 0.053 | 0.052 | 0.003 |
| HER-92 M100F, D101A, Y102L | 0.038 | 0.037 | 0.037 | 0.043 | 0.038 | 0.003 |
| | Eₘₐₓ (%) | | | | | |
| Antibody | Plate 1 | Plate 2 | Plate 3 | Plate 4 | Average | StDev |
| HER-75 D98, M100, D101, | 30.6 | 33.2 | 35.0 | 33.4 | 33.1 | 1.8 |
| Y102L | | | | | | |
| HER-88 D98W, M100F, D101A, | 41.3 | 39.4 | 40.4 | 38.4 | 39.9 | 1.3 |
| Y102L | | | | | | |
| HER-89 D98W, M100F, D101A | 42.0 | 39.8 | 45.4 | 43.4 | 42.7 | 2.4 |
| HER-90 D98W, M100F, Y102L | 41.4 | 40.1 | 41.0 | 41.6 | 41.0 | 0.7 |
| HER-91 D98W, D101A, Y102L | 48.1 | 39.8 | 46.3 | 41.2 | 43.8 | 4.0 |
| HER-92 M100F, D101A, Y102L | 37.0 | 35.1 | 37.5 | 34.6 | 36.1 | 1.4 |

### Example 5. In Vivo Characterization of Anti-HER2 Monospecific Antibody Molecules

### Quantification In Vivo in Mouse Serum and Brain Homogenates

[1415] HER-10 vectorized in VOY9P39 capsid (5.0E11 VG/mouse) or vectorized human IgG1 isotype control antibody were prophylactically administered IV to Fox Chase SCID CB17 mice (Charles River Labs, #236) 12 days prior to xenotransplantation of MDA-MB-361-luc tumor cells in the brain. Mouse serum and brain homogenate samples were collected 30 days post-xenograft and analyzed for functional antibodies by quantifying the percentage of total human IgG1 that binds to HER2 in a custom AlphaLISA assay. To quantify HER2 binding, 10 μL of samples (1:1,000 serum dilution or 1:50 brain homogenate dilution) were added to white 384-well plates and were mixed with recombinant his-tagged HER2 ECD (R&D Systems), Protein A Alpha Donor Beads (Perkin Elmer), and Nickel Chelate AlphaLISA Acceptor Beads (Perkin Elmer) in a 40 uL final assay volume. Functional binding was interpolated from a standard curve of a reference anti-HER2 antibody. Total human IgG1 was quantified via an AlphaLISA Detection Kit (Perkin Elmer AL307) following manufacturer protocols. Briefly, for total human IgG1 detection, 5 μL of sample was added to a white 384-well plate and incubated with AlphaLISA beads in a 50 uL final assay volume. AlphaLISA readings were taken on a PerkinElmer EnVision 2105 Multimode Plate Reader. Standard curves and data interpolation were analyzed in GraphPad Prism using a sigmoidal 4PL fit with 1/Y² data weighting. The HER-10 antibodies in mouse serum were found to be ˜89% functional when quantified via a HER2-binding AlphaLISA assay and normalized against total human IgG1. The human IgG1 isotype control antibodies displayed negligible HER2 binding. Percentages of functional antibody from brain tissue homogenate could not be calculated since samples fell outside the linear range of the assay.

### Example 6. In Vivo Characterization of Vectorized Anti-HER2 Monospecific Antibody Molecules

[1416] The brain distribution of various capsids targeting the central nervous system (CNS) in mice (VOY101, VOY9P39, and VOY9P33) was studied to determine which capsid to use for vectorization of the anti-HER2 constructs. VOY9P39 and VOY9P33, are capsids created by the TRACER method as described in WO2020/072683, Nonnenmacher et al. 2019 Molecular Therapy 27(4S1):27-27, and Nonnenmacher et al. 2021 Molecular Therapy—Methods & Clinical Development 20:366-378, which are hereby incorporated by reference in their entirety.

[1417] Capsid were compared for their brain distributions after IV administration of 4e11 VG/100 uL/Mouse IV injections of CNS targeting capsids in CB17/SCID mice (BALB/C background) with CBA-Driven EGFP transgene.

[1418] Orthotopic xenografts of BT474 passage 24 cells were injected (250,000 cells/2 uL/mouse) intracranially into female Fox Chase SCID CB17 (Mutation: Icr-Prkdcscid/IcrIcoCrl) congenic immunodeficient mice from Charles River Laboratories (#3611), that were 65 days old. The injections were 2.5 mm (lateral), −1 mm (posterior) with respect to bregma, lowered −3 mm ventral and raised +0.5 mm dorsal to a final −2.5 mm ventral position. 6 days later, dilutions of VOY101 or the CNS targeting capsids VOY9P33 or VOY9P39 mediating GFP transgene expression underwent IV injection of 100 uL (4e11 VG/animal), administered through the tail veins of mice, n=5 mice per cohort. At 7 days post AAV, the respective 5 mouse cohorts were euthanized and underwent necropsy. Immunohistochemistry was performed and sagittal sections were stained for anti GFP (for AAV expression) and anti human nucleoli (for human tumor cell identification). FIGS. 13A-13C show the brain distributions of the tested capsids.

### PK/PD Dynamics in the Serum, CSF, and Brain Post Intravenous Administration of HER-10 Vectorized in VOY9P39 Capsid

[1419] Orthotopic xenografts of MDA-MB-361-Luc #1 passage 33 cells grown as tumorspheres (in tumorsphere media; Sigma #C-28070) were injected (250,000 cells/2 uL/mouse) intracranially into female Fox Chase SCID CB17 (Mutation: Icr-Prkdcscid/IcrIcoCrl) congenic immunodeficient mice from Charles River Laboratories (#3611), that were 60 days old. The injections were 2.5 mm (lateral), −1 mm (posterior) with respect to bregma, lowered −3 mm ventral and raised +0.5 mm dorsal to a final −2.5 mm ventral position. 9 days later, dilutions of the AAV comprised of a CNS targeting novel capsid VOY9P39 and a genome encoding HER-10 was prepared. IV injections of 100 uL (5e11 VG/animal) were administered through the tail veins of mice, n=3 mice per cohort. At 7, 14, and 28 days post AAV, the respective 3 mouse cohorts were euthanized and underwent necropsy. AlphaLISA quantification of hIgG1 was performed on the serum, CSF and brain (contralateral to xenograft injection site) samples, ddPCR was performed on cryopulverized brain samples, contralateral to xenograft injection site. Table 32 shows the concentration of the antibodies from different locations and at varying time frames from AAV treatment. FIGS. 14A-14D show the concentration of the HER-10 antibody in the serum, CSF, brain tissue, and brain/ddPCR on days 7, 14, and 28 post AAV treatment.

TABLE 32
Antibody Concentration after treatment with HER10
(5e11 VG/mouse; N = 3) at day 9 post-xenograft

| Source | Day Post AAV | Mean | Units | Std. Dev. | Std. Error |
|---|---|---|---|---|---|
| Serum | 7 | 6.617 | (ug/ml) | 1.19 | 0.6869 |
| | 14 | 24.6 | (ug/ml) | 4.997 | 2.885 |
| | 28 | 63.86 | (ug/ml) | 42.69 | 24.64 |
| CSF | 7 | 1.182 | (ug/ml) | 0.1563 | 0.09025 |
| | 14 | 1.492 | (ug/ml) | 0.502 | 0.2898 |
| | 28 | 1.286 | (ug/ml) | 0.8529 | 0.6031 |
| Brain | 7 | 0.02724 | % total protein | 0.00548 | 0.003164 |
| | 14 | 0.03833 | % total protein | 0.003843 | 0.002219 |
| | 28 | 0.04583 | % total protein | 0.02092 | 0.01208 |
| Brain/ddPCR | 7 | 445 | vector genome/diploid cell | 142.2 | 82.08 |
| | 14 | 274.3 | vector genome/diploid cell | 57.06 | 32.95 |
| | 28 | 105 | vector genome/diploid cell | 43.58 | 25.16 |

### Prophylactic Treatment Using IV Administration of HER-10 Vectorized in VOY9P39 Capsid (5e11 VG/Mouse) of Prior to Xenograft

[1420] Dilutions of the AAV particles composed of a CNS targeting capsid VOY9P39 and a genome encoding either human IgG1 isotype control antibody) or HER-10 were prepared in a blinded manner to the study experimenters. IV injections of 100 uL (5e11 VG/animal) were administered through the tail veins of mice, n=10 mice per cohort. Twelve days later, orthotopic xenografts of MDA-MB-361-Luc #1 passage 33 cells grown as tumorspheres (in tumorsphere media; Sigma #C-28070) were injected intracranially (250,000 cells/2 uL/mouse). The mice used were female, Fox Chase SCID CB17 Mutation: Ter-Prkdcscid/IcrIeoCrl Congenic Immunodeficient from Charles River Laboratories (#3611); 88 days old. The injections were 2.5 mm (lateral), −1 mm (posterior) with respect to bregma, lowered −3 mm ventral and raised +0.5 mm dorsal to a final −2.5 mm ventral position. 7 Days later and every week after that until day 28 post xenograft, mice were imaged in an AmiHTX (Spectral Imager) for bioluminescence of the human tumor cells expression of luciferase in response to intraperitoneal luciferin injections. At day 30, the mice were euthanized and necropsies performed. Immunohistochemistry staining for H&E, anti-GFP, and anti-human nucleoli was performed. AlphaLISA quantification of hIgG1 was performed and normalized to a % total protein in the case of brain homogenate, ddPCR quantification of total vector genomes per diploid cell was performed on cryopulverized brain samples. Table 33 displays the data from the vectorized HER-10 treatment in comparison to the vectorized human IgG1 isotype control antibody.

TABLE 33
iv administration of HER-10 vectorized in VOY9P39
capsid (5e11 VG/mouse, 42 Days Post AAV, N = 9)

| | Treatment | | | | Std. | |
|---|---|---|---|---|---|---|
| Source | Type | Treatment | Mean | Units | Dev. | Std. Error |
| Serum | Day 12 | Ctrl (HER08) | 39.61 | (ug/ml) | 11.94 | 3.981 |
| | Prophylactic | HER10 | 102.1 | (ug/ml) | 35.89 | 11.96 |
| Brain | | Ctrl (HER08) | 0.02035 | % total protein | 0.008788 | 0.002929 |
| | | HER10 | 0.04654 | % total protein | 0.01547 | 0.005156 |
| Brain/ddPCR | | Ctrl (HER08) | 68.29 | vector | 19.52 | 6.506 |
| | | | | genomes/diploid | | |
| | | | | cell | | |
| | | HER10 | 75.11 | vector | 24.92 | 8.306 |
| | | | | genomes/diploid | | |
| | | | | cell | | |

[1421] Prophylactic treatment 12 days prior to xenograft with IV administration of HER-10 delivered by the CNS targeting capsid VOY9P39 (5e11 VG/mouse) demonstrated persistent and significant abrogation of tumor growth as compared to control (hIgG1) treated mice. FIGS. 15A-15D show the comparison of the control to the HER-10 in the in the serum, CSF, brain tissue, and brain ddPCR.

IV Treatment with HER-10 or HER-53 Vectorized in VOY9P39 Capsid (2.5e11 VG/Mouse) on Day 2 Post-Xenograft

[1422] Orthotopic xenografts of MDA-MB-361-Luc #1 passage 33 cells grown as tumorspheres (in tumorsphere media; Sigma #C-28070) were injected (125,000 cells/2 uL/mouse) intracranially into female Fox Chase SCID CB17 (Mutation: Icr-Prkdcscid/IcrIcoCrl) congenic immunodeficient mice from Charles River Laboratories (#3611), that were 60 days old. The injections were 2.5 mm (lateral), −1 mm (posterior) with respect to bregma, lowered −3 mm ventral and raised +0.5 mm dorsal to a final −2.5 mm ventral position. Two days later, dilutions of AAV particles composed of the CNS targeting capsid VOY9P39 and a genome encoding either human IgG1 isotype control antibody, HER-10 or HER-53 were prepared in a blinded manner to the study experimenters. IV injections of 100 uL (2.5E11 vector genomes per animal) were administered through the tail veins of mice, n=5 mice per cohort. 7 Days later and every week after that until day 49 post xenograft, mice were imaged in an AmiHTX (Spectral Imager) for bioluminescence of the human tumor cells expression of luciferase in response to intraperitoneal luciferin injections. Blood collection was performed with a syringe inserted into tail vein at days 43 and 63 post AAV injections (Table 44). AlphaLISA quantification of hIgG1 was performed on the serum samples. Survival of mice was monitored with twice weekly weighing and symptoms of tumor burden (pain, hunched, ruffled fur, seizures, motor impairment, or −20% weight loss) resulted in euthanasia and removal from study. FIGS. 16A-16E show the normalized total flux, the concentration of the antibody and probability of survival for the HER-10 (FIGS. 16A-16C) and HER-53 (FIGS. 16D-16E) iv treatments.

TABLE 44
iv administration of HER-10 vectorized in VOY9P39 capsid (2.5e11
VG/mouse, Treatment Day 2 Post Xerograph, Serum Source)

| Day | | | | | Std. | Std. |
|---|---|---|---|---|---|---|
| Post AAV | Treatment | n | Mean | Units | Dev. | Error |
| 43 | Ctrl (HER08) | 5 | 30.72 | (ug/ml) | 6.271 | 2.805 |
| 43 | HER10 | 5 | 99.64 | (ug/ml) | 30.82 | 13.78 |
| 63 | Ctrl (HER08) | 4 | 39.21 | (ug/ml) | 11.73 | 5.866 |
| 63 | HER10 | 5 | 118.1 | (ug/ml) | 34.75 | 15.54 |
| 99 | Ctrl (HER08) | 2 | 67.64 | (ug/ml) | 9.43 | 5.44 |
| 99 | HER10 | 5 | 162.3 | (ug/ml) | 47.1 | 14.9 |

[1423] Two days post xenograft IV treatment with HER-10 delivered by the CNS targeting AAV capsid VOY9P39 (2.5E11 vector genomes per mouse) demonstrated persistent and significant tumor growth suppression as compared to human IgG1 (Control_hIgG1) treated mice.

Intracranial Treatment with HER-10 Vectorized in VOY-101 Capsid (6e10 VG/Mouse) on Day 2 Post-Xenograft

[1424] Orthotopic xenografts of BT474 cells were injected (250,000 cells/2 uL/mouse) intracranially into female Fox Chase SCID CB17 (Mutation: Icr-Prkdcscid/IcrIcoCrl) congenic immunodeficient mice from Charles River Laboratories (#3611), that were 60 days old. The injections were 2.5 mm (lateral), −1 mm (posterior) with respect to bregma, lowered −3 mm ventral and raised +0.5 mm dorsal to a final −2.5 mm ventral position. A guide screw cannula was implanted into the injection site. Two days later, dilutions of AAV particles composed of the VOY-101 capsid and a genome encoding either HER-10 or a control (hIgG1-Ctrl) were prepared in a blinded manner to the study experimenters. An intracranial injection of 6e10 VG/animal was administered through the cannula into the striatum, n=15 mice per cohort. 7 Days after the xenograft, and twice weekly after that, mice were imaged in an IVIS for bioluminescence of the human tumor cells expression of luciferase in response to subcutaneous luciferin injections. Survival of mice was monitored with twice weekly weighing and symptoms of tumor burden (pain, hunched, ruffled fur, seizures, motor impairment, or −20% weight loss) resulted in euthanasia and removal from study. FIGS. 17A and 17B shows the normalized total flux and probability of survival, respectively, comparing the vectorized HER-10 and the control treatment.

[1425] Two days post xenograft intracranial treatment with HER10 delivered by VOY-101 (6e10 VG/mouse) demonstrates persistent and significant tumor growth suppression as compared to human IgG1 (Control_hIgG1) treated mice.

Innate Immune Response Upon Treatment with HER-10 Vectorized in AAV9P39-Capsid (2.5e11 VG/Mouse) as Evidenced by Increased in Overall CD45⁺ Cells

[1426] After Cd11b IHC staining of formalin fixed paraffin embedded sections from 28-day old orthotopic xenografts derived from transplantation of MDA-MB-361 cells into mouse brain and 2 day post treated with i.v. administration of AAV9P39-HER-10 (2.5e11 VG/mouse) evidence of innate immune cells surrounding and infiltrating the tumor was discovered (FIG. 18). To investigate this further single cell RNA sequencing was carried out on mouse immune cells (CD45t) derived from the peritumoral area from HER08-Ctrl and HER10 treated xenografts at day 28 post AAV9P39 treatment. Orthotopic xenografts of MDA-MB-361-Luc #1 passage 30 cells grown as tumorspheres (in tumorsphere media; Sigma #C-28070) were injected (250,000 cells/2 uL/mouse) intracranially into female Fox Chase SCID CB17 (Mutation: Icr-Prkdcscid/IcrIcoCrl) congenic immunodeficient mice from Charles River Laboratories (#3611), that were 62 days old. The injections were 2.5 mm (lateral), −1 mm (posterior) with respect to bregma, lowered −3 mm ventral and raised +0.5 mm dorsal to a final −2.5 mm ventral position. Two days later, dilutions of blood brain barrier penetrant novel capsid VOY9P39 mediating either HER-08 (hIgG1) or HER-10 were prepared. IV injections of 100 uL (2.5e11 VG/animal) were administered through the tail veins of mice, n=5 mice per cohort. 7 Days later mice were imaged in an AmiHTX (Spectral Imager) for bioluminescence of the human tumor cells expression of luciferase in response to intraperitoneal luciferin injections.

[1427] Two tumor bearing mice from each cohort (9P39, HER08-Ctrl vs Her10) were weighed and then injected with 10 ml/Kg of ketamine cocktail (ketamine, xylazine and acepromazine injectable drugs). After 5 minutes, and when mice were knocked out and unresponsive to toe pinch each mouse underwent trans-cardial perfusion, performed with PBS. The brains were removed and right hemi-brain area around tumor cell injection site was cut off in a brain matrice (Fisher Sci #50-195-4415) with a razor blade. The brains were minced in L15 and digested at 6 C for 25 minutes in protease inhibitor (Creative Biomart #NATE-0633) and dissociated. Myelin depletion was performed (Miltenyi, #130-096-731), and then cells were stained with CD45 antibody (Miltenyi, #130-110-796) and FACS sorted for 7AAD⁻ (viability) and CD45⁺ (immune cells). There was 1.5× higher proportion of CD45⁺ cells in the HER-10 treated cohort indicating an enrichment of the innate immune response in that condition. Cells were loaded on a 10× chromium G chip and the scRNA-Seq was run and processed according to manufacturer's protocols (10× Genomics). Samples were sequenced on a NextGen500 Sequencing machine (Illumina).

[1428] The resultant FASTQ files were demultiplexed and aligned to the MM10 reference genome using CellRanger (10× Genomics). Next, the resultant data matrix of cell counts was processed using RStudio and the Seurat package with R version 4.1.1. The data was filtered to include only cells with only greater than 1000 genes per cell and less than 5000, and less than 20 percent mitochondrial gene expression. The 2 data matrix files were normalized, scaled, and integrated into one combined dataset. Clusters were generated with a resolution of 0.3 and each cluster identity was determined using a panel of cell type specific genes (Hammond et al., Immunity, 50(1):253-271 (2019); Hove et al., Nature Neuroscience 22:1021-1035 (2019); Ochocka et al., Nat Commun 12:1151 (2021); Villani et al., Science 356(6335):eaah4573 (2017), which are hereby incorporated by reference in their entirety).

[1429] Proliferating microglia (MKI67 high expressing microglia cells) were enriched by almost three-fold as a proportion of total microglia in the HER10 treated mouse brain CD45⁺ cells as compared to the HER08-Ctrl treatment conditions (Table 45). Moreover, natural killer cells (NK), dendritic cells (DC), and innate lymphocytic cells (ILC), were more abundant as cellular populations determined by their proportion of total mouse brain CD45⁺ cells in the HER10 cohort as compared to the HER08-Ctrl cohort (Table 46).

TABLE 45
Microglia Cell Types as a Percent of Total Microglia by Treatment

| Microglia Cluster | | | Proportion |
|---|---|---|---|
| Identity | HER08-Ctrl | HER10 | HER10/HER08 |
| aMic | 12.30 | 16.90 | 1.37 |
| pMic | 1.40 | 4.00 | 2.86 |
| hMic | 87.67 | 83.12 | 0.95 |

aMic = active microglia (Clusters 3 & 9)
pMic = proliferation microglia (Cluster 9)
hMic = homeostatic microglia (Clusters 0, & 2)

TABLE 46
Fold Change in Proportion of Cluster Cells to Total
CD45 Sorted Mouse Cell Population by Treatment

| Cluster Identity | HER10/HER08 |
|---|---|
| migDC | 30.37 |
| pDC | 21.09 |
| cDC2 | 8.16 |
| ILC2 | 5.17 |
| NK cells | 2.99 |
| dividing microglia | 1.88 |
| non class MC | 1.64 |
| Active Microglia | 0.77 |
| Microglia_1 | 0.63 |
| Microglia_2 | 0.57 |
| Macrophages | 0.52 |

[1430] Microglia; cDC2 (conventional); Macrophages; NK; ncMC (non-classical monocytes); ILC2 (innate lymphoid cell); pDC (plasmacytoid); migDC (migratory); neutrophils

[1431] An innate immune response was evident in the HER10 population as evidenced by an increased in overall CD45⁺ cells during FACS analysis, as well as increased proportions of active proliferating microglia, DC, NK cells, and ILC. The intriguing aspect of increased DC populations is that they mediate the interaction between the innate immune response and the adaptive immune response and therefore, perhaps our AAV mediated gene therapy may elicit an even greater therapeutic response in patients with intact immune systems rather than in our preclinical mouse models of immune incompetent mice.

### Example 7. Generation of Anti-HER2 Bispecific Antibody Molecules

[1432] Genetic element constructs were designed for AAV delivery of anti-HER2 bispecific antibodies. The nucleotide sequences from 5′ ITR to 3′ ITR of the genetic element constructs that comprise a transgene encoding a bispecific HER2 antibody molecules are provided as HER-73 (SEQ ID NO: 5190), HER-78 (SEQ ID NO: 5375), HER-97 (SEQ ID NO: 6505), HER-98 (SEQ ID NO: 6506), HER-99 (SEQ ID NO: 6507), HER-100 (SEQ ID NO: 6508), and HER-101 (SEQ ID NO: 6509) herein. These construct are also summarized in Tables 6, 25, and 43.

[1433] The genetic element construct comprises a nucleic acid comprising a transgene encoding a bispecific antibody molecule that binds to HER2. The transgene was designed to comprise a nucleotide sequence encoding an antibody heavy chain signal sequence (SEQ ID NO:5157), a nucleotide sequence encoding an antibody heavy chain variable region (VH) (SEQ ID NO: 5261), a nucleotide sequence encoding antibody heavy chain constant region (SEQ ID NO: 5215 or 5219), a nucleotide sequence encoding a linker region comprising a T2A linker (SEQ ID NO: 1726), which was flanked by a furin cleavage site (SEQ ID NO: 1724) at the 5′ end of the T2A linker, a nucleotide sequence encoding an antibody heavy chain variable region (VH) (SEQ ID NO: 6552, 6537, 6540, 6543, 6546, or 6549), a nucleotide sequence encoding an antibody light chain variable region (VL) (SEQ ID NO: 5265), and a nucleotide sequence encoding an antibody light chain constant region (SEQ ID NO: 5217).

[1434] The encoded antibody of HER-73, HER-78, HER-97, HER-98, HER-99, HER-100, and HER-101 comprise a heavy chain signal sequence (SEQ ID NO:5158), an antibody heavy chain variable region (VH) (SEQ ID NO: 5262, 6536, 6539, 6542, 6545, or 6548), an antibody heavy chain constant region (SEQ ID NO: 5216 or 5220), an antibody light chain variable region (VL) (SEQ ID NO: 5267) and an antibody light chain constant region (SEQ ID NO: 5218).

### Example 8. Generation of ITR-ITR Constructs for the Expression of Anti-HER2 Bispecific Antibody Molecules

[1435] In designing the genetic element constructs for expression of bispecific HER2 antibody molecules (HER-57, HER-62, HER-73, HER-78, HER-97, HER-98, HER-99, HER-100, and HER-101), several promoters were selected. The ubiquitous CB promoter (SEQ ID NO: 6566) was used for HER-62 (SEQ ID NO: 5188), HER-73 (SEQ ID NO: 5189), HER-78 (SEQ ID NO: 5375), HER-97 (SEQ ID NO: 6505), HER-98 (SEQ ID NO: 6506), HER-99 (SEQ ID NO: 6507), HER-100 (SEQ ID NO: 6508), and HER-101 (SEQ ID NO: 6509). The ubiquitous CB promoter (SEQ ID NO: 6566) further comprising a CMV(IE) promoter (SEQ ID NO: 6594), was used for HER-57 (SEQ ID NO: 5187). All nine bispecific HER2 antibodies further comprised an ie exon 1 region (SEQ ID NO: 6573), an ie intron 1 region (SEQ ID NO: 6578), a second human beta-globin intron region (SEQ ID NO: 6580), and a human beta-globin exon region (SEQ ID NO: 6576).

[1436] The 5′ ITR (SEQ ID NO: 6559), the polyadenylation sequence (SEQ ID NO: 6590), and the 3′ ITR (SEQ ID NO: 6561) were the same across all HER-57, HER-62, HER-73, HER-78, HER-97, HER-98, HER-99, HER-100, and HER-101 genetic element constructs designed for the expression of anti-HER2 bispecific antibody molecules.

[1437] All nine genetic element constructs and their component parts are summarized in Tables 6, 19, 24, 25, and 43 above.

### Example 9. In Vitro Characterization of Anti-HER2 Bispecific Antibody Molecules

### BT-474 and SK-BR-3 Cell Proliferation Assays of HER-73 and HER-78

[1438] SK-BR-3 cells were dispensed at 625 cells/well using a Multidrop Combi Reagent Dispenser (Thermo Scientific) into white 384-well plates pre-dispensed with antibody serial dilutions (two-fold) or tucatinib serial dilutions (three-fold). The assay plates were covered with Microclime Environmental Lids (Beckman Coulter 0015717) filled with 8 mL of UltraPure Distilled water (Invitrogen 10977-015) to reduce well evaporation. Cell proliferation was measured using the CellTiter-Glo 2.0 assay (Promega G9242) after four days. Luminescence measurements were taken on an EnVision 2105 Multimode Plate Reader, and data were analyzed in GraphPad Prism using a variable slope (four parameters) fit with 1/Y² data weighting (FIGS. 19A and 19C, Tables 61 and 62). Edge wells were excluded from analysis. The HER-73 and HER-78 antibodies had a larger effect on cell growth inhibition of BT-474 cells than did HER-10 or the ZW-25 bispecific antibody. Tucatinib-treated cells served as positive control for cell growth inhibition. Similar to BT-474 cells, SK-BR-3 cells were sensitive to HER-73 and HER-78, which had a larger effect on cell growth inhibition than did HER-10 or the ZW-25 bispecific antibody (FIGS. 19B and 19D, Tables 61 and 62).

TABLE 61
IC₅₀ and Eₘₐₓ of HER-73, ZW-25, and HER-
10 in SK-BR-3 cells and BT-474 cells

| | SK-BR-3 cells | | BT-474 cells | |
|---|---|---|---|---|
| Antibody | IC₅₀ (μg/mL) | Eₘₐₓ (%) | IC₅₀ (μg/mL) | Eₘₐₓ (%) |
| HER-73 | 0.070 | 52.0 | 0.039 | 51.3 |
| ZW-25 | 0.431 | 35.0 | 0.125 | 41.5 |
| HER-10 | 0.068 | 36.6 | 0.038 | 40.0 |

TABLE 62
IC₅₀ and Eₘₐₓ of HER-73, HER-78, and HER-
10 in SK-BR-3 cells and BT-474 cells

| | SK-BR-3 cells | | BT-474 cells | |
|---|---|---|---|---|
| Antibody | IC₅₀ (μg/mL) | Eₘₐₓ (%) | IC₅₀ (μg/mL) | Eₘₐₓ (%) |
| HER-73 | 0.092 | 55.5 | 0.056 | 47.5 |
| HER-78 | 0.051 | 52.8 | 0.038 | 45.1 |
| HER-10 | 0.077 | 36.8 | 0.037 | 30.1 |

### Heavy Chain CDR3 Mutant Binding Affinity Measurements for Bispecific Antibody Molecules

[1439] The antibody binding of the heavy chain CDR3 mutants in a bispecific antibody molecule (HER-97, HER-98, HER-99, HER-100, HER-101) to HER2 was analyzed by Biacore 8K (GE Healthcare) surface plasmon resonance instrument (SPR) as described above and the antibody concentration range used was 0.625 to 40 nM (Table 73).

TABLE 73
Binding affinity of Heavy CDR3 mutants in a bispecific antibody to HER2

| | | | | | | | | Fit quality | |
|---|---|---|---|---|---|---|---|---|---|
| | | | | | | | | parameters | |
| | | | | | | | | | chi2/ |
| | HCDR3 | | | | | | | | Rmax |
| | Modif. | | Kinetic parameters | | | | | Kinetics | (%) |
| | (according | | KD | | | | Rmax | Chi² | (Calc. |
| Construct | to Kabat) | Replicate | (nM) | ka (1/Ms) | kd (1/s) | KD (M) | (RU) | (RU²) | unit) |
| HER78 | D98 | 1 | 0.54 | 1.38E+05 | 7.53E−05 | 5.44E−10 | 77.8 | 0.16 | 0.2% |
| | M100, | 2 | 0.57 | 1.74E+05 | 9.89E−05 | 5.70E−10 | 74.4 | 0.30 | 0.4% |
| | D101, | Mean | 0.44 | 1.64E+05 | 7.28E−05 | 4.36E−10 | 73.85 | | |
| | Y102 | % CV | 43.5 | 8.6 | 50.8 | 43.5 | 1.1 | | |
| HER97 | D98W, | 1 | 0.21 | 1.87E+05 | 3.98E−05 | 2.13E−10 | 71.4 | 0.25 | 0.4% |
| | M100F, | 2 | 0.27 | 1.84E+05 | 4.98E−05 | 2.70E−10 | 75.1 | 0.29 | 0.4% |
| | D101A, | Mean | 0.24 | 1.86E+05 | 4.48E−05 | 2.42E−10 | 73.25 | | |
| | Y102L | % CV | 16.7 | 1.1 | 15.8 | 16.7 | 3.6 | | |
| HER98 | D98W, | 1 | 0.29 | 1.47E+05 | 4.27E−05 | 2.90E−10 | 65.6 | 0.09 | 0.1% |
| | M100F, | 2 | 0.33 | 1.46E+05 | 4.82E−05 | 3.30E−10 | 67.5 | 0.11 | 0.2% |
| | D101A | Mean | 0.31 | 1.47E+05 | 4.55E−05 | 3.10E−10 | 66.55 | | |
| | | % CV | 9.1 | 0.5 | 8.6 | 9.1 | 2.0 | | |
| HER99 | D98W, | 1 | 0.33 | 1.79E+05 | 5.83E−05 | 3.25E−10 | 57.7 | 0.16 | 0.3% |
| | M100F, | 2 | 0.36 | 1.80E+05 | 6.42E−05 | 3.57E−10 | 59.7 | 0.15 | 0.2% |
| | Y102L | Mean | 0.34 | 1.80E+05 | 6.13E−05 | 3.41E−10 | 58.70 | | |
| | | % CV | 6.6 | 0.4 | 6.8 | 6.6 | 2.4 | | |
| HER100 | D98W, | 1 | 0.36 | 1.79E+05 | 6.46E−05 | 3.61E−10 | 49.6 | 0.08 | 0.2% |
| | D101A, | 2 | 0.37 | 1.82E+05 | 6.78E−05 | 3.72E−10 | 50.3 | 0.15 | 0.3% |
| | Y102L | Mean | 0.37 | 1.81E+05 | 6.62E−05 | 3.67E−10 | 49.95 | | |
| | | % CV | 2.1 | 1.2 | 3.4 | 2.1 | 1.0 | | |
| HER101 | M100F, | 1 | 0.27 | 1.72E+05 | 4.59E−05 | 2.67E−10 | 53.6 | 0.05 | 0.1% |
| | D101A, | 2 | 0.31 | 1.66E+05 | 5.10E−05 | 3.07E−10 | 55.7 | 0.06 | 0.1% |
| | Y102L | Mean | 0.29 | 1.69E+05 | 4.85E−05 | 2.87E−10 | 54.65 | | |
| | | % CV | 9.9 | 2.5 | 7.4 | 9.9 | 2.7 | | |

### SK-BR-3 Cell Proliferation Assays of Heavy Chain CDR3 Mutant for Bispecific Antibody Molecule (HER78)

[1440] SK-BR-3 cells were plated at 5000 cells/well into black 96-well plates with clear bottom. Next day, antibody dilutions (three-fold) were added to the plate such that the final concentration range of 0.001 to 10 pig/ml of antibody was achieved. Cell proliferation was measured using the CellTiter-Glo 2.0 assay (Promega G9242) after five days. Luminescence measurements were taken on SpectraMax M3 Reader, and data were analyzed in GraphiPad Prism using a variable slope (four parameters) fit with 1/Y² data weighting. Edge wells were excluded from analysis. Inhibition of cell proliferation was observed for all HCDR3 mutants of bispecific antibody but the IC50 values were higher than HER78. HER98 showed the lowest IC50 value among the mutants. HER08 was used as an isotype control in the experiment (Table 74).

TABLE 74
IC₅₀ and Eₘₐₓ of HER-78, HER-97, HER-98, HER-99,
HER-100 and HER-101 in SK-BR-3 cells

| Construct and HCDR3 Modifications | | IC50 | Emax |
|---|---|---|---|
| (according to Kabat) | | (μg/mL) | (%) |
| HER78 | D98 M100, D101, Y102 | 0.08 | 56.45 |
| HER97 | D98W, M100F, D101A, Y102L | 0.81 | 63.23 |
| HER98 | D98W, M100F, D101A | 0.19 | 52.02 |
| HER99 | D98W, M100F, Y102L | 0.87 | 49.23 |
| HER97 | D98W, D101A, Y102L | 0.66 | 59.11 |
| HER101 | M100F, D101A, Y102L | 0.60 | 61.03 |

### Example 10. High-Throughput Screen of TRACER AAV Library in NHP and Mice

[1441] A TRACER based method as described in WO2020072683, WO 2021/202651, and WO2021/230987, the contents of which are herein incorporated by reference in their entirety, was used to generate the AAV capsid variants described herein. An orthogonal evolution approach was combined with a high throughput screening by NGS. Briefly, the library of AAV capsid variants was generated using a sliding window approach, where 6 amino acid sequences were inserted into 8 different positions across loop IV of AAV9, including immediately subsequent to positions 453, 454, 455, 456, 457, 458, 459, and 460, relative to a reference sequence numbered according to SEQ ID NO: 138. The initial library was passed twice through non-human primates (NHP, 2-4 years of age). After the second passage (e.g., 28 days post injection into two NHPs), RNA was extracted from six brain regions. Following RNA recovery and RT-PCR amplification, a systematic NGS enrichment analysis was performed to calculate fold enrichment relative to an AAV9 wild-type control. Following these two passages, approximately 21195 variants were identified with an average fold change greater than wild-type. Of the 21195 variants, 1558 demonstrated a fold-change of greater than 6 compared to wild-type and were detected across all brain regions investigated. Of these 1558, approximately 1470 variants were selected for constructing a synthetic library and a third passage through two NHPs. Within the 1470 variants selected for further characterization and investigation, there was a relatively even distribution for each insertion position of the sliding window used to generate the initial library.

[1442] After creation of the synthetic library with the sub-selected variants, the synthetic library was screened (passage 3) in two NHPs (2-4 years of age) and two strains of mice, BALB/c (n=3, 6-8 weeks of age) and C57Bl/6 mice (n=3, 6-8 weeks of age), in a first cross-species evolution screen. The animals were injected intravenously with the synthetic library. After a period in vivo, (e.g., 28-days) RNA was extracted from nervous tissue, e.g., brain, spinal cord, and DRG of the NHPs and the brains of mice. Following RNA recovery and RT-PCR amplification, a systematic NGS enrichment analysis was performed, and the peptides comprised within the variants were identified and the capsid enrichment ratio for each variant compared to the wild-type AAV9 control was calculated (fold enrichment relative to wild-type AAV9) (Table 9). Values above 1 indicate an increase in expression relative to AAV9. All animals were dosed intravenously at 2-3 VG/kg across the screen.

[1443] As shown in Table 9, approximately 700 variants demonstrated an increase in expression relative to AAV9, and several variants demonstrated a greater than 10-fold enrichment relative to AAV9 in the brain of NHPs. Further, the variants demonstrating the greatest fold enrichment in the brain also demonstrated the greatest fold enrichment in the spinal cord relative to AAV9 in NHPs. These variants also demonstrated de-targeting in the DRG (data not shown). For instance, the variant comprising GSGSPHSKAQNQQT (SEQ ID NO: 200) demonstrated a 76.6-fold enrichment in the brain, a 29.4 fold enrichment in the spinal cord, and 0.4 fold enrichment in the DRG of NHPs relative to AAV9; and GHDSPHKSGQNQQT (SEQ ID NO: 201) demonstrated a 62.6 fold enrichment in the brain, a 15.6 fold enrichment in the spinal cord, and 0.0 fold enrichment in the DRG of NHPs relative to AAV9. Also, across the peptides comprised within the AAV capsid variants with the greatest fold-enrichment in the NHP brain relative wild-type AAV9, it was observed that each of these peptides comprised an SPH motif in the same position (e.g., immediately subsequent to position 455, relative to a reference sequence numbered according to the amino acid sequence of SEQ ID NO: 138), regardless of the insertion position within the variant capsid, as well as a positive amino acid (e.g., K or R) in one of the next three residues subsequent to the SPH motif.

[1444] Those variants with the greatest fold enrichment in the brains of NHPs also had the greatest fold enrichment in the brains of both mouse species. Also, when comparing the fold enrichment relative to wild-type for each variant between the two species of mice investigated (C57Bl/6 and BALB/c mice), they were highly correlated (R²=0.8591).

TABLE 9
NGS fold-enrichment of AAV capsid variants in NHPs and mice

| | | | | Fold | Fold |
|---|---|---|---|---|---|
| | | Fold | Fold | enrichment | enrichment |
| | | enrichment | enrichment | over | over |
| | | over AAV9 | over AAV9 in | AAV9 in the | AAV9 in the |
| Peptide | SEQ | in the brain | the spinal cord | brain of Mice | brain of Mice |
| Sequence | ID NO: | of NHPs | of NHPs | (C57BI/6) | (BALB/c) |
| GSGSPHSKAQNQQT | 200 | 73.615 | 29.402 | 25.293 | 41.304 |
| GHDSPHKSGQNQQT | 201 | 62.612 | 15.641 | 63.993 | 49.760 |
| GSGSPHARMQNQQT | 202 | 56.138 | 22.690 | 7.795 | 4.164 |
| GSGSPHVKSQNQQT | 203 | 37.551 | 13.649 | 8.069 | 15.861 |
| GQDSPHKSGQNQQT | 204 | 24.569 | 3.548 | 57.344 | 42.615 |
| GSGSPHASRQNQQT | 205 | 18.265 | 7.804 | 28.028 | 36.577 |
| GSGSPHASRQNKQT | 206 | 17.520 | 35.029 | 13.096 | 18.114 |
| GSGSPHVKIQNQQT | 207 | 16.854 | 9.068 | 2.173 | 2.227 |
| GSGSPHSKAKNQQT | 208 | 14.458 | 0.049 | 21.494 | 23.556 |
| GSGSPHKKNQNQQT | 209 | 12.991 | 0.379 | 25.958 | 7.415 |
| GSGSPHVRMQNQQT | 210 | 11.574 | 6.764 | 9.121 | 10.076 |
| GSGSPHASRQKQQT | 211 | 11.417 | 0.005 | 7.413 | 12.400 |
| GHSSPHRSGQNQQT | 212 | 10.357 | 1.887 | 23.197 | 25.442 |
| GMRTYHLSGQNQQT | 213 | 9.241 | 1.939 | 2.033 | 1.586 |
| GSGSPHTRGQNQQT | 214 | 7.092 | 3.815 | 10.801 | 6.240 |
| GSGIIPVSSQNQQT | 215 | 6.352 | 0.000 | 0.642 | 0.253 |
| GSEYGHKSGQNQQT | 216 | 6.308 | 2.750 | 5.198 | 5.332 |
| GRGQNVSSVHRQQT | 217 | 5.404 | 0.000 | 1.206 | 0.691 |
| GSSHRFYGGQNQQT | 218 | 4.732 | 0.000 | 0.787 | 0.110 |
| GYFVAAWSGQNQQT | 219 | 4.488 | 0.000 | 0.071 | 0.175 |
| GSVLHSHAAQNQQT | 220 | 4.150 | 6.448 | 0.675 | 0.423 |
| GSGDLVVSTQNQQT | 221 | 3.874 | 1.177 | 0.411 | 0.273 |
| GSYGMAASGQNQQT | 222 | 3.817 | 10.052 | 1.274 | 0.829 |
| GLNHFGASGQNQQT | 223 | 3.802 | 3.188 | 0.774 | 0.579 |
| GSTGSHSAGQNQHT | 224 | 3.717 | 0.285 | 1.190 | 0.850 |
| GLAGHTVSGQNQQT | 225 | 3.632 | 0.229 | 0.972 | 0.202 |
| GIILGASSGQNQQT | 226 | 3.630 | 4.868 | 1.378 | 0.865 |
| GSGVSTYNIQNQQT | 227 | 3.609 | 2.912 | 0.769 | 0.520 |
| GSLVSVQTGQNQQT | 228 | 3.534 | 6.043 | 0.903 | 0.469 |
| GQSSPHRSGQNQQT | 229 | 3.496 | 2.142 | 12.352 | 19.366 |
| GREYGHKSGQNQQT | 230 | 3.453 | 0.000 | 1.422 | 0.959 |
| GHTLTLSSGQNQQT | 231 | 3.405 | 5.648 | 0.648 | 0.606 |
| GSITLIPSGQNQQT | 232 | 3.361 | 3.917 | 0.326 | 0.435 |
| GSNGFTALGQNQQT | 233 | 3.361 | 2.663 | 0.830 | 0.332 |
| GSGHSSHSVQNQQT | 234 | 3.339 | 3.318 | 0.942 | 0.424 |
| GSGIPQRSGKNQQT | 235 | 3.331 | 0.000 | 1.418 | 1.685 |
| GSGDTLHMLQNQQT | 236 | 3.317 | 1.174 | 0.393 | 0.482 |
| GERHTVLSGQNQQT | 237 | 3.289 | 3.008 | 1.027 | 0.607 |
| GSGMPQSHIQNQQT | 238 | 3.289 | 11.609 | 0.514 | 0.334 |
| GSGQLSGIGGNQQT | 239 | 3.266 | 0.287 | 0.993 | 0.626 |
| GSGQNRKPASFAQT | 240 | 3.204 | 0.000 | 0.892 | 1.061 |
| GSGSVSQLGQNQQT | 241 | 3.184 | 2.307 | 0.596 | 0.375 |
| GSDFLGTHGQNQQT | 242 | 3.171 | 0.348 | 1.038 | 0.750 |
| GQIVQNPSGQNQQT | 243 | 3.133 | 0.406 | 1.446 | 0.635 |
| GSGTQIPSQQNQQT | 244 | 3.112 | 1.224 | 0.470 | 0.151 |
| GSGQNQQSAREGLT | 245 | 3.111 | 5.632 | 1.221 | 1.104 |
| GSGLGMSTGQNQQT | 246 | 3.110 | 5.499 | 0.458 | 0.660 |
| GSGLPVLSGQNQQT | 247 | 3.100 | 4.149 | 0.631 | 0.210 |
| GSGHSIRTDQNQQT | 248 | 3.074 | 15.600 | 0.229 | 0.148 |
| GSGQSVQTVVNQQT | 249 | 3.057 | 5.441 | 0.582 | 0.240 |
| GSGQNRAQSRFQQT | 250 | 3.043 | 0.000 | 0.619 | 1.788 |
| GGGDLGRSSQNQQT | 251 | 3.036 | 4.830 | 0.916 | 0.539 |
| GGGTKMDSGQNQQT | 252 | 3.034 | 0.000 | 0.733 | 0.297 |
| GSGSPHPSRQNQQT | 253 | 3.017 | 1.993 | 1.869 | 0.975 |
| GSGQFTNAGMNQQT | 254 | 2.969 | 0.936 | 0.565 | 0.418 |
| GGRNGHTVGQNQQT | 255 | 2.965 | 3.732 | 1.105 | 1.003 |
| GSGFGPQTGQNQQT | 256 | 2.964 | 2.861 | 1.280 | 0.849 |
| GRTDSHTSGQNQQT | 257 | 2.913 | 1.510 | 1.299 | 0.704 |
| GYEVLGSSGQNQQT | 258 | 2.891 | 0.000 | 2.459 | 0.319 |
| GSVHLSVTGQNQQT | 259 | 2.882 | 1.157 | 0.741 | 0.282 |
| GFMSYKGSGQNQQT | 260 | 2.865 | 0.209 | 1.808 | 0.569 |
| GNIAGSVSGQNQQT | 261 | 2.849 | 1.187 | 0.446 | 0.257 |
| GSGSHRDVSQNQQT | 262 | 2.843 | 4.022 | 0.626 | 0.550 |
| GGLGSMSSGQNQQT | 263 | 2.812 | 1.405 | 1.802 | 0.822 |
| GSGHLPQSAQNQQT | 264 | 2.803 | 7.828 | 0.826 | 0.496 |
| GGVLVGGSGQNQQT | 265 | 2.778 | 0.178 | 1.527 | 0.688 |
| GTHPYTSSGQNQQT | 266 | 2.775 | 1.684 | 0.758 | 0.471 |
| GSGQNQQLKENRST | 267 | 2.765 | 0.062 | 1.149 | 1.118 |
| GSGQNQQTSPHNHT | 268 | 2.761 | 3.132 | 1.524 | 0.845 |
| GSGTLYPQSQNQQT | 269 | 2.761 | 5.558 | 0.324 | 0.160 |
| GSGQNQQSNWITKT | 270 | 2.711 | 0.000 | 0.540 | 0.634 |
| GSGYTSLFLQNQQT | 271 | 2.710 | 0.010 | 0.490 | 1.044 |
| GSGVMTHVLQNQQT | 272 | 2.692 | 0.347 | 0.370 | 0.533 |
| GSVSDVRAGQNQQT | 273 | 2.661 | 1.647 | 0.267 | 0.747 |
| GSGQSHMATLNQQT | 274 | 2.657 | 0.724 | 1.173 | 0.504 |
| GSGLSVHLAQNQQT | 275 | 2.657 | 1.234 | 0.806 | 0.508 |
| GSGLSHATQQNQQT | 276 | 2.640 | 7.819 | 1.111 | 0.638 |
| GSGLSVQSGQNQQT | 277 | 2.637 | 2.929 | 1.695 | 1.005 |
| GSGHMTYREKNQQT | 278 | 2.633 | 5.267 | 1.257 | 0.540 |
| GSKGVPTPGQNQQT | 279 | 2.625 | 1.292 | 1.452 | 0.459 |
| GSGLLPLSSQNQQT | 280 | 2.612 | 1.130 | 0.501 | 0.293 |
| GNGLYAVSGQNQQT | 281 | 2.611 | 9.148 | 0.322 | 0.213 |
| GFNGSPSSGQNQQT | 282 | 2.609 | 12.197 | 2.338 | 0.924 |
| GSGQIRHSDQNQQT | 283 | 2.600 | 12.884 | 1.170 | 0.320 |
| GGQVAPSSGQNQQT | 284 | 2.581 | 2.427 | 1.433 | 0.709 |
| GSFSMHTHGQNQQT | 285 | 2.535 | 0.118 | 1.027 | 0.693 |
| GSGQNQQVIQGSNT | 286 | 2.521 | 8.778 | 0.935 | 0.810 |
| GRVLHSHAGQNQQT | 287 | 2.513 | 0.826 | 1.294 | 0.908 |
| GSGQNQQTSLQDQT | 288 | 2.505 | 0.500 | 0.315 | 0.968 |
| GSGLGRAPVQNQQT | 289 | 2.503 | 2.214 | 0.841 | 0.383 |
| GNGFSSASGQNQQT | 290 | 2.493 | 0.772 | 0.240 | 0.182 |
| GSGQMASRESNQQT | 291 | 2.492 | 0.300 | 0.341 | 0.288 |
| GPGLPNHSGQNQQT | 292 | 2.486 | 1.992 | 1.197 | 0.659 |
| GNIQWQGSGQNQQT | 293 | 2.468 | 6.266 | 1.182 | 0.837 |
| GMSAHMSSGQNQQT | 294 | 2.456 | 5.255 | 1.310 | 0.947 |
| GHSFVNRSGQNQQT | 295 | 2.447 | 11.148 | 1.305 | 0.756 |
| GRAVMDHSGQNQQT | 296 | 2.408 | 3.209 | 0.728 | 0.283 |
| GALTVMQSGQNQQT | 297 | 2.381 | 0.430 | 0.246 | 0.199 |
| GSGQRSPVLPNQQT | 298 | 2.369 | 6.230 | 0.434 | 0.526 |
| GSGQNGHLSLKQQT | 29 | 2.362 | 1.896 | 0.718 | 0.270 |
| GSLPRGTSDQNQQT | 300 | 2.362 | 0.000 | 0.453 | 0.495 |
| GVAGSLVSGQNQQT | 301 | 2.358 | 7.670 | 1.321 | 1.160 |
| GRGGIPQSGQNQQT | 302 | 2.352 | 8.683 | 1.639 | 1.181 |
| GSGQYASSIPNQQT | 303 | 2.346 | 3.321 | 1.022 | 0.489 |
| GTDFGRQSSQNQQT | 304 | 2.346 | 3.196 | 1.021 | 0.797 |
| GIFMQTPSGQNQQT | 305 | 2.344 | 6.198 | 0.938 | 0.252 |
| GSGQNQQTRLVDLT | 306 | 2.342 | 9.348 | 1.268 | 0.490 |
| GTREMPLSGQNQQT | 307 | 2.339 | 2.830 | 1.436 | 0.538 |
| GSRLVHVHGQNQQT | 308 | 2.334 | 1.174 | 1.277 | 0.934 |
| GSGRLVPNGPNQQT | 309 | 2.314 | 3.925 | 0.639 | 0.411 |
| GSGYLRESPQNQQT | 310 | 2.311 | 0.878 | 0.331 | 0.677 |
| GARIQNASGQKQQT | 311 | 2.300 | 2.103 | 1.220 | 1.039 |
| GLSNPMPSGQNQQT | 312 | 2.280 | 6.033 | 1.190 | 0.829 |
| GSTVQDTRGQNQQT | 313 | 2.270 | 4.979 | 0.576 | 0.473 |
| GPFGMPSSGQNQQT | 314 | 2.260 | 2.700 | 0.727 | 0.560 |
| GSGQNHGVLSNQQT | 315 | 2.254 | 1.603 | 1.113 | 0.701 |
| GSGYSMSQAQNQQT | 316 | 2.250 | 4.479 | 0.519 | 0.329 |
| GSGMLTHTLQNQQT | 317 | 2.246 | 2.272 | 0.496 | 0.199 |
| GRGSPHASRQNQQT | 318 | 2.241 | 0.000 | 5.050 | 5.856 |
| GLSWPSTSGQNQQT | 319 | 2.238 | 0.000 | 0.910 | 0.610 |
| GNSMERTSGQNQQT | 320 | 2.221 | 4.177 | 1.047 | 0.935 |
| GSGMSPSTLQNQQT | 321 | 2.216 | 3.053 | 0.318 | 0.153 |
| GSGHGQVLSQNQQT | 322 | 2.213 | 12.133 | 1.880 | 0.661 |
| GRGQIYSTGGNQQT | 323 | 2.210 | 11.629 | 1.329 | 0.743 |
| GVVAAHNSGQNQQT | 324 | 2.202 | 1.301 | 1.196 | 1.336 |
| GDSSLRHSGQNQQT | 325 | 2.194 | 0.000 | 0.662 | 0.412 |
| GSLVSQGAGQNQQT | 326 | 2.188 | 4.414 | 1.436 | 1.246 |
| GSLLQAHSGQNQQT | 327 | 2.182 | 1.008 | 0.575 | 0.748 |
| GSGHIYVGIQNQQT | 328 | 2.178 | 6.428 | 0.989 | 0.337 |
| GHHTTVQSGQNQQT | 329 | 2.177 | 6.245 | 0.851 | 0.755 |
| GSRQSKRNELNQQT | 330 | 2.177 | 0.000 | 1.325 | 0.232 |
| GSGQNQQHVSSPRT | 331 | 2.176 | 1.279 | 1.847 | 0.938 |
| GSSKELLWGQNQQT | 332 | 2.163 | 0.000 | 0.506 | 0.883 |
| GSLSTPSSGQNQQT | 333 | 2.159 | 1.279 | 1.094 | 0.669 |
| GSIGYAGQGQNQQT | 334 | 2.157 | 4.951 | 1.604 | 0.712 |
| GSGQNQRVSNSQQT | 335 | 2.146 | 0.492 | 1.086 | 0.985 |
| GSGYASHVQQNQQT | 336 | 2.146 | 3.038 | 1.157 | 0.758 |
| GSGEYSRSGQNQQT | 337 | 2.145 | 0.745 | 0.617 | 0.205 |
| GSVSTHSSGQNQQT | 338 | 2.145 | 3.446 | 1.198 | 0.918 |
| GSGQNQHSLGNYQT | 339 | 2.143 | 1.896 | 1.077 | 0.606 |
| GSGGLDTRGQNQQT | 340 | 2.139 | 6.216 | 0.236 | 0.197 |
| GNILHATSGQNQQT | 341 | 2.136 | 0.125 | 1.159 | 0.424 |
| GSGQSYTMTQNQQT | 342 | 2.136 | 6.755 | 0.297 | 0.231 |
| GSGQNQHSAPNSQT | 343 | 2.134 | 4.143 | 1.187 | 0.731 |
| GSGQNQQTMDHNRT | 344 | 2.130 | 4.944 | 0.642 | 0.440 |
| GSNGGVGTGQNQQT | 345 | 2.130 | 0.788 | 1.191 | 1.087 |
| GAGSIIPSGQNQQT | 346 | 2.129 | 7.164 | 0.595 | 0.249 |
| GSGQTHGGQHNQQT | 347 | 2.125 | 12.251 | 1.448 | 1.098 |
| GSNLSFQSGQNQQT | 348 | 2.122 | 5.853 | 1.087 | 0.719 |
| GATLQVHSGQNQQT | 349 | 2.122 | 2.219 | 0.623 | 0.545 |
| GSGFNQRSEQNQQT | 350 | 2.121 | 4.491 | 1.770 | 0.758 |
| GSGSLRDFDQNQQT | 351 | 2.120 | 6.846 | 0.586 | 0.272 |
| GSGDSITGKQNQQT | 352 | 2.112 | 1.295 | 0.793 | 0.306 |
| GSGQDRNIVQNQQT | 353 | 2.112 | 0.229 | 0.454 | 0.632 |
| GSGLSHSHQQNQQT | 354 | 2.109 | 5.852 | 1.256 | 0.592 |
| GSGQNQQTGMSSVK | 355 | 2.109 | 4.544 | 1.451 | 0.679 |
| GSVTHGISGQNQQT | 356 | 2.105 | 4.542 | 1.135 | 0.789 |
| GVVAHQPSGQNQQT | 357 | 2.103 | 0.152 | 0.910 | 2.267 |
| GSGPILGQLQNQQT | 358 | 2.097 | 2.058 | 0.470 | 0.123 |
| GSGHVPNSGLNQQT | 359 | 2.091 | 0.653 | 1.636 | 1.154 |
| GDAGVRSSGQNQQT | 360 | 2.068 | 3.918 | 1.033 | 1.193 |
| GSGSQLMSLQNQQT | 361 | 2.065 | 3.559 | 0.563 | 0.172 |
| GSGLDYSQRQNQQT | 362 | 2.056 | 0.837 | 0.484 | 0.217 |
| GSGQSSGRLINKQT | 363 | 2.055 | 28.135 | 0.543 | 0.277 |
| GSSVSPSSGQNQQT | 364 | 2.054 | 0.579 | 1.064 | 0.787 |
| GSGQVVGLSGNQQT | 365 | 2.052 | 7.212 | 0.785 | 0.881 |
| GSNMGVPLGQNQQT | 366 | 2.049 | 2.448 | 0.334 | 0.420 |
| GSFYPSSTGQNQQT | 367 | 2.047 | 2.374 | 0.420 | 0.277 |
| GSGQNQQTRLTDLT | 368 | 2.046 | 8.470 | 0.910 | 0.776 |
| GPTNGRSSGQNQQT | 369 | 2.034 | 8.903 | 0.936 | 1.308 |
| GSGLLHGKLQNQQT | 370 | 2.032 | 2.521 | 1.068 | 0.917 |
| GANMGHVSGQNQQT | 371 | 2.020 | 0.810 | 1.302 | 1.138 |
| GSGQNQQSGRGDLT | 372 | 2.019 | 6.919 | 0.524 | 1.152 |
| GSHGHYASGQKQQT | 373 | 2.016 | 0.000 | 0.895 | 0.685 |
| GSGDLRISPQNQQT | 374 | 2.012 | 16.207 | 0.620 | 0.237 |
| GSGMPVILGQNQQT | 375 | 2.005 | 0.150 | 0.840 | 0.287 |
| GRGVITSSGQNHQT | 376 | 2.004 | 0.864 | 1.656 | 0.669 |
| GSGHSVSGPQNQQT | 377 | 1.993 | 6.259 | 1.370 | 0.619 |
| GSRNGHTVGRNQQT | 378 | 1.993 | 0.000 | 1.162 | 0.367 |
| GAGVHMVSGQNQQT | 379 | 1.987 | 6.488 | 1.055 | 0.791 |
| GSGQNHRPSVLQQT | 380 | 1.983 | 5.582 | 0.433 | 0.582 |
| GSGSPRDSIQNQQT | 381 | 1.981 | 4.914 | 0.171 | 0.446 |
| GSGQGIHSSVNQQT | 382 | 1.981 | 4.873 | 0.632 | 0.634 |
| GSGQQLSITPNQQT | 383 | 1.979 | 10.280 | 0.845 | 0.201 |
| GGYHSQTSGQNQQT | 384 | 1.978 | 2.642 | 1.740 | 1.525 |
| GSLHHDNHGQNQQT | 385 | 1.976 | 0.980 | 0.968 | 0.463 |
| GIMARDSSGQNQQT | 386 | 1.972 | 3.486 | 1.320 | 0.904 |
| GVVHITNSGQNQQT | 387 | 1.969 | 0.504 | 0.794 | 0.846 |
| GSGQNQHSAPFNQT | 388 | 1.969 | 0.499 | 0.759 | 0.870 |
| GSGQTSGLKQNQQT | 389 | 1.968 | 3.927 | 0.394 | 0.334 |
| GSGQNQQTSLSNTA | 390 | 1.959 | 1.186 | 1.567 | 1.182 |
| GSGQNQAVHNKSQT | 391 | 1.956 | 3.791 | 1.465 | 1.083 |
| GVHTHLPSGQNQQT | 392 | 1.952 | 1.364 | 1.414 | 0.796 |
| GHLTMHNSGQNHQT | 393 | 1.938 | 1.798 | 1.030 | 0.586 |
| GSGSSSRPYQNQQT | 394 | 1.934 | 3.823 | 0.962 | 0.496 |
| GILLATPSGQNQQT | 395 | 1.931 | 8.205 | 1.341 | 0.288 |
| GSGQNAGSFPNQQT | 396 | 1.928 | 12.575 | 1.091 | 0.286 |
| GSRDGHTVGQNQQT | 397 | 1.928 | 7.089 | 0.495 | 0.661 |
| GSLLISTSGQNQQT | 398 | 1.919 | 5.763 | 1.488 | 0.808 |
| GSGAMPSHGQNQQT | 399 | 1.915 | 0.000 | 1.142 | 0.912 |
| GALVSPISGQNQQT | 400 | 1.912 | 1.051 | 0.640 | 0.347 |
| GSLSSHGVGQNQQT | 401 | 1.911 | 7.498 | 1.218 | 0.804 |
| GSGQNQQASLAMRT | 402 | 1.910 | 3.577 | 2.066 | 1.638 |
| GPGLGSHSGQNQQT | 403 | 1.906 | 14.563 | 0.880 | 1.195 |
| GHDSQHKSGQNQQT | 404 | 1.904 | 6.988 | 1.154 | 0.869 |
| GSGLTLSATQNQQT | 405 | 1.901 | 0.193 | 0.708 | 0.340 |
| GSGQVVAHVGNQQT | 406 | 1.901 | 0.833 | 0.800 | 0.321 |
| GSGLRTMTTQNQQT | 407 | 1.900 | 8.939 | 0.838 | 0.594 |
| GSGQVGRLLQNQQT | 408 | 1.899 | 1.762 | 0.773 | 0.748 |
| GSGQLSHQSVNQQT | 409 | 1.898 | 4.032 | 0.720 | 0.695 |
| GSGDRYQTLQNQQT | 410 | 1.897 | 1.075 | 0.645 | 0.318 |
| GSGQNQQLKSSAQT | 411 | 1.891 | 1.197 | 0.908 | 0.716 |
| GSGQNQYSIPVAQT | 412 | 1.891 | 1.194 | 0.511 | 0.297 |
| GSGERLHLTQNQQT | 413 | 1.885 | 1.456 | 0.387 | 0.245 |
| GSGHNQQVRTAPNT | 414 | 1.885 | 1.022 | 1.006 | 0.580 |
| GGLSHVMSGQNQQT | 415 | 1.875 | 0.403 | 0.885 | 0.378 |
| GSGQSHRDVLNQQT | 416 | 1.872 | 15.082 | 0.138 | 0.280 |
| GSGQNLAGRMDQQT | 417 | 1.864 | 0.085 | 0.362 | 0.295 |
| GSGQNQQTNRGNPM | 418 | 1.860 | 3.402 | 1.349 | 1.098 |
| GSGQSYQRDHNQQT | 419 | 1.859 | 8.013 | 0.779 | 0.323 |
| GSLLSAGMGQNQHT | 420 | 1.856 | 6.168 | 0.589 | 0.342 |
| GSGQNQQTAIYRNI | 421 | 1.854 | 2.207 | 0.818 | 1.437 |
| GSGQNQQTSGTTNC | 422 | 1.854 | 8.161 | 1.040 | 0.806 |
| GMTSHSVSGQNQQT | 423 | 1.850 | 2.732 | 0.220 | 0.154 |
| GSSQSTGYQPNQQT | 424 | 1.847 | 3.388 | 0.522 | 0.577 |
| GSLKPTTLGQNQQT | 425 | 1.840 | 0.476 | 0.175 | 0.220 |
| GRMFSLGSGQNQQT | 426 | 1.836 | 8.429 | 1.630 | 1.174 |
| GSGQNQQTALGVKC | 427 | 1.835 | 1.343 | 1.378 | 1.014 |
| GAMVSHSSGQNQQT | 428 | 1.833 | 8.999 | 0.739 | 0.868 |
| GSGQNQQRNSDSVT | 429 | 1.829 | 0.000 | 1.238 | 0.842 |
| GSGQSMTLHLNQQT | 430 | 1.827 | 0.991 | 0.721 | 0.248 |
| GSGQVHQAEVNQQT | 431 | 1.825 | 0.152 | 0.436 | 0.287 |
| GSGQNQSQNHLQQT | 432 | 1.825 | 0.600 | 1.063 | 0.772 |
| GSLLTTASGQNQQT | 433 | 1.822 | 0.780 | 0.938 | 0.635 |
| GSGLIRTAAQNQQT | 434 | 1.822 | 8.339 | 0.808 | 0.998 |
| GSGQNQQTVSRQST | 435 | 1.820 | 0.472 | 1.330 | 0.796 |
| GSGQYANHGINQQT | 436 | 1.820 | 5.717 | 0.906 | 0.701 |
| GSRSTGPSGQNQQT | 437 | 1.819 | 2.479 | 0.440 | 0.466 |
| GRGVQQKLQQNQQT | 438 | 1.817 | 0.000 | 1.974 | 0.823 |
| GSGQNQQVHLSTGT | 439 | 1.811 | 0.266 | 1.011 | 0.455 |
| GSGQNQQLSAKSST | 440 | 1.809 | 1.567 | 1.224 | 1.115 |
| GSGYKAARPQNQQT | 441 | 1.803 | 0.000 | 1.418 | 0.337 |
| GSAGISPSGQNQQT | 442 | 1.797 | 1.812 | 0.784 | 0.622 |
| GSGQNRAHAFLQQT | 443 | 1.795 | 0.000 | 1.200 | 1.271 |
| GSGLSGITMQNQQT | 444 | 1.792 | 14.796 | 0.862 | 0.496 |
| GPGSAHSSGQNQQT | 445 | 1.785 | 4.392 | 1.099 | 0.872 |
| GSSHTQALGQNQQT | 446 | 1.784 | 0.143 | 0.882 | 0.874 |
| GSGVHGVSSQNQQT | 447 | 1.781 | 4.519 | 1.504 | 0.951 |
| GSSGRDMGGQNQQT | 448 | 1.778 | 2.177 | 1.052 | 0.595 |
| GERAFPTSGQNQQT | 449 | 1.775 | 6.515 | 0.972 | 0.362 |
| GGRIVSLSGQNQQT | 450 | 1.766 | 4.936 | 1.161 | 0.847 |
| GSGQNSYSHTSQQT | 451 | 1.765 | 2.262 | 1.130 | 0.658 |
| GLGYPGSSGQNQQT | 452 | 1.763 | 7.090 | 0.929 | 0.577 |
| GSGPQSHTGQNQQT | 453 | 1.757 | 9.490 | 0.958 | 0.447 |
| GSGQNQQLSRDAST | 454 | 1.754 | 3.716 | 1.877 | 0.611 |
| GSGQILHSVPNQQT | 455 | 1.752 | 1.316 | 0.398 | 0.240 |
| GSGEHTDSRQNQQT | 456 | 1.748 | 4.384 | 7.344 | 0.575 |
| GSGQSHSLATNQQT | 457 | 1.745 | 2.711 | 1.021 | 0.343 |
| GSGQNQQTLSKPWT | 458 | 1.743 | 0.253 | 0.845 | 0.733 |
| GSGHAAISQQNQQT | 459 | 1.742 | 2.373 | 1.211 | 0.520 |
| GSGQNQQQIGGNST | 460 | 1.741 | 6.169 | 0.877 | 0.576 |
| GGGPMAGSGQNQQT | 461 | 1.735 | 2.815 | 1.049 | 0.372 |
| GMRMEYQSGQNQQT | 462 | 1.729 | 3.695 | 0.644 | 0.632 |
| GSGQNQQGTLLHQT | 463 | 1.728 | 2.065 | 1.347 | 1.303 |
| GSGQNQRSSGGVQT | 464 | 1.723 | 2.056 | 1.805 | 1.165 |
| GSGQNQRGALATQT | 465 | 1.722 | 1.117 | 0.899 | 0.891 |
| GSGTVHAATQNQQT | 466 | 1.721 | 1.676 | 0.563 | 0.476 |
| GSRMTQQFGQNQQT | 467 | 1.720 | 25.798 | 1.233 | 0.976 |
| GSSSPGASGQNQQT | 468 | 1.717 | 1.244 | 1.378 | 0.660 |
| GHPSPHVSGQNQQT | 469 | 1.713 | 0.416 | 0.551 | 0.488 |
| GSGSHHASRQNQQT | 470 | 1.712 | 0.451 | 3.073 | 0.584 |
| GAVGHSYSGQNQQT | 471 | 1.706 | 0.808 | 0.306 | 0.536 |
| GSRSQYDIGQNQQT | 472 | 1.706 | 0.112 | 0.528 | 0.193 |
| GSGQGPQERGNQQT | 473 | 1.702 | 1.269 | 0.846 | 0.313 |
| GSIAHVGTGQNQQT | 474 | 1.696 | 1.264 | 0.837 | 1.045 |
| GSGQNQQKQNHGNT | 475 | 1.695 | 5.349 | 1.538 | 1.340 |
| GSGQNQQALGSQRT | 476 | 1.695 | 1.934 | 1.419 | 0.562 |
| GSGAITHMPQNQQT | 477 | 1.695 | 1.681 | 0.647 | 0.411 |
| GSGQRNPLLLNQQT | 478 | 1.693 | 0.144 | 0.662 | 0.740 |
| GSSGIPVSHQNQQT | 479 | 1.690 | 3.384 | 0.820 | 0.333 |
| GVHSLTPSGQNQQT | 480 | 1.687 | 4.104 | 0.475 | 0.215 |
| GVIVLHGSGQNQQT | 481 | 1.682 | 14.166 | 1.074 | 1.098 |
| GGTRVVDSGQNQQT | 482 | 1.676 | 9.735 | 0.676 | 0.370 |
| GSGGVTYQSQNQQT | 483 | 1.673 | 7.283 | 0.649 | 0.181 |
| GSGQNQAGHGPGQT | 484 | 1.670 | 2.861 | 1.040 | 0.887 |
| GSGQLVTSGPNQQT | 485 | 1.669 | 5.271 | 0.964 | 0.433 |
| GSGIAAQRTQNQQT | 486 | 1.665 | 2.691 | 1.062 | 0.754 |
| GSTPAGVGGQNQQT | 487 | 1.663 | 2.733 | 0.593 | 0.477 |
| GSGQNQQTSTGVHS | 488 | 1.660 | 8.271 | 1.039 | 1.075 |
| GSGQIRQLVDNQQT | 489 | 1.657 | 5.529 | 0.314 | 0.272 |
| GSLIGMQSGQNQQT | 490 | 1.656 | 6.783 | 0.797 | 0.392 |
| GSGQIKGKMDNQQT | 491 | 1.654 | 2.601 | 1.065 | 1.012 |
| GSGSDMSSWQNQQT | 492 | 1.651 | 0.175 | 0.281 | 0.303 |
| GRGQNQQHTGLATT | 493 | 1.650 | 6.174 | 1.134 | 0.691 |
| GSGQNQQTLYSSNT | 494 | 1.642 | 1.044 | 0.664 | 0.368 |
| GSGQTQVLKSNQQT | 495 | 1.640 | 3.031 | 1.599 | 0.975 |
| GSRTLSNVGQNQQT | 496 | 1.640 | 3.219 | 0.617 | 0.542 |
| GSGVQHSLPQNQQT | 497 | 1.639 | 0.764 | 0.440 | 0.387 |
| GNYLHQASGQNQQT | 498 | 1.635 | 1.454 | 0.816 | 0.181 |
| GSGGTSVHQQNQQT | 499 | 1.629 | 0.000 | 0.585 | 0.195 |
| GMDHSRPSGQNQQT | 500 | 1.627 | 3.976 | 0.918 | 0.648 |
| GSGQNQQSMGTFTT | 501 | 1.625 | 0.000 | 1.792 | 0.399 |
| GSGQNQQTPLRPPT | 502 | 1.624 | 0.352 | 0.874 | 0.472 |
| GSGQNQHHSVSQQT | 503 | 1.623 | 3.700 | 0.605 | 0.334 |
| GSGQLRSLSTNQQT | 504 | 1.622 | 6.855 | 1.310 | 0.382 |
| GSGSPRQLSQNQQT | 505 | 1.621 | 0.873 | 0.520 | 0.273 |
| GSGQNQQTTASSHT | 506 | 1.618 | 7.404 | 0.745 | 0.678 |
| GRGQVVSTHQNQQT | 507 | 1.607 | 3.318 | 0.931 | 0.561 |
| GSAQVSMVGQNQQT | 508 | 1.601 | 1.332 | 0.500 | 0.285 |
| GSSTLVTIGKNQQT | 509 | 1.592 | 4.316 | 0.917 | 0.819 |
| GFAHQASSGQNQQT | 510 | 1.587 | 1.852 | 1.638 | 1.080 |
| GSGQPVLSISNQQT | 511 | 1.586 | 2.695 | 0.390 | 0.282 |
| GSGQSHRSELNQQT | 512 | 1.585 | 11.974 | 0.668 | 0.256 |
| GSSVGSPIGQNQQT | 513 | 1.584 | 3.574 | 1.059 | 0.706 |
| GSGMPIRNVQNQQT | 514 | 1.584 | 0.138 | 0.684 | 0.631 |
| GSSTRVDSGQNQQT | 515 | 1.584 | 2.774 | 0.704 | 0.660 |
| GSGQNQQTAMRSTT | 516 | 1.581 | 2.588 | 0.656 | 0.665 |
| GSGQNQQHSSSHLT | 517 | 1.581 | 2.782 | 1.091 | 0.859 |
| GSRNGHAVGQNQQT | 518 | 1.574 | 2.688 | 0.434 | 0.939 |
| GLGAYQSSGQNQQT | 519 | 1.574 | 0.696 | 1.407 | 0.688 |
| GPGLSGHSGQNQQT | 520 | 1.571 | 1.603 | 1.154 | 1.297 |
| GSTGIVSSGQNQQT | 521 | 1.570 | 0.927 | 2.141 | 1.046 |
| GSRTTQVIGQNQQT | 522 | 1.570 | 1.838 | 0.773 | 0.564 |
| GSGLLHRAQQNQQT | 523 | 1.569 | 0.724 | 1.583 | 0.646 |
| GSGQNAQQAAAQQT | 524 | 1.568 | 4.239 | 0.937 | 0.604 |
| GSGQNQQSALRTQT | 525 | 1.568 | 1.913 | 1.581 | 1.421 |
| GSGFLSDTRQNQQT | 526 | 1.566 | 45.953 | 0.473 | 0.575 |
| GSGLLYHDQQNQQT | 527 | 1.565 | 2.760 | 0.405 | 0.107 |
| GSGQNQHYSLHKQT | 528 | 1.563 | 3.399 | 1.485 | 1.273 |
| GSGHSPLPQQNQQT | 529 | 1.562 | 0.556 | 0.387 | 0.247 |
| GNGHSMRPNQNQQT | 530 | 1.560 | 2.341 | 0.693 | 0.376 |
| GSGLKWSTLQNQQT | 531 | 1.556 | 0.000 | 1.134 | 2.442 |
| GSGQMGRQAVNQQT | 532 | 1.554 | 1.529 | 0.535 | 0.411 |
| GSGQNQQTSGVLTL | 533 | 1.553 | 0.000 | 1.104 | 0.782 |
| GSGQNQQALHNPHT | 534 | 1.553 | 0.664 | 0.638 | 0.213 |
| GSGQNQQVIPNSKT | 535 | 1.548 | 1.036 | 0.844 | 0.376 |
| GSPLQDRVGQNQQT | 536 | 1.548 | 0.753 | 0.469 | 0.391 |
| GSGQNQYSSTNPQT | 537 | 1.542 | 2.251 | 0.544 | 0.535 |
| GAMTVTISGQNQQT | 538 | 1.542 | 6.249 | 0.443 | 0.257 |
| GSGQNQQLQTLIRT | 539 | 1.538 | 1.425 | 0.813 | 0.514 |
| GSGLRQTSQQNQQT | 540 | 1.537 | 2.067 | 0.978 | 0.705 |
| GSGQNQQTGLRQQT | 541 | 1.533 | 2.120 | 1.217 | 1.103 |
| GSGQTRQMKDNQQT | 542 | 1.530 | 11.079 | 0.841 | 0.214 |
| GSGQNHGLQSGQQT | 543 | 1.530 | 4.960 | 0.938 | 0.779 |
| GSGQSHRQPENQQT | 544 | 1.529 | 2.153 | 0.209 | 0.159 |
| GSGQDRHIVQNQQT | 545 | 1.527 | 11.068 | 0.285 | 0.162 |
| GSGQNQQLPHSNLT | 546 | 1.521 | 1.838 | 0.442 | 0.283 |
| GSGQLSVPYDNQQT | 547 | 1.521 | 0.000 | 0.622 | 0.111 |
| GSGRNPQTQPLQQT | 548 | 1.519 | 0.040 | 0.733 | 0.573 |
| GSGQPYSTGLNQQT | 549 | 1.519 | 1.403 | 0.612 | 0.376 |
| GSGQNQQTHGGLRD | 550 | 1.519 | 6.487 | 1.913 | 1.298 |
| GAYGMVSSGQNQQT | 551 | 1.518 | 3.469 | 0.732 | 0.773 |
| GSGIQSSYSQNQQT | 552 | 1.517 | 15.978 | 1.032 | 0.684 |
| GPRLSDQSGQNQQT | 553 | 1.511 | 0.364 | 0.640 | 0.579 |
| GSGQNQQTHPSPCT | 554 | 1.510 | 1.003 | 1.120 | 0.546 |
| GSGQSFQMHTNQQT | 555 | 1.504 | 9.770 | 0.503 | 0.325 |
| GSGQNQQTGNPKHT | 556 | 1.504 | 5.973 | 1.391 | 1.139 |
| GFSSAVHSGQNQQT | 557 | 1.502 | 1.234 | 0.218 | 0.210 |
| GSGQNQQTSMSNAT | 558 | 1.501 | 6.766 | 1.605 | 0.745 |
| GSGQDMKQHHNQQT | 559 | 1.501 | 1.638 | 0.358 | 0.239 |
| GIRLSTPSGQNQQT | 560 | 1.498 | 4.334 | 0.804 | 0.522 |
| GSGQNQQTSVYMNT | 561 | 1.498 | 0.613 | 0.640 | 0.983 |
| GSGQNQYSQSSMQT | 562 | 1.494 | 4.278 | 0.375 | 0.309 |
| GSGQNQQSMADHTT | 563 | 1.494 | 1.728 | 0.428 | 0.215 |
| GWERSFVSGQNQQT | 564 | 1.492 | 0.943 | 0.490 | 0.538 |
| GLLAGKSSGQNQQT | 565 | 1.491 | 2.981 | 0.999 | 0.946 |
| GKSFVPQSGQNQQT | 566 | 1.489 | 2.502 | 1.798 | 0.430 |
| GSGQMQSAGSNQQT | 567 | 1.482 | 0.116 | 1.034 | 1.128 |
| GSDQNQRLTSSMQT | 568 | 1.479 | 0.164 | 0.875 | 0.670 |
| GESRAVLSGQNQQT | 569 | 1.476 | 0.938 | 0.789 | 0.368 |
| GSVFGVPSGQNQQT | 570 | 1.474 | 1.248 | 0.685 | 0.213 |
| GSGLPDRNLQNQQT | 571 | 1.471 | 7.306 | 1.136 | 0.611 |
| GSGTHNSAIQNQQT | 572 | 1.469 | 0.570 | 0.762 | 0.574 |
| GSGMIIASMQNQQT | 573 | 1.469 | 6.722 | 1.135 | 0.415 |
| GGITWTDSGQNQQT | 574 | 1.462 | 4.535 | 1.472 | 0.468 |
| GSGQNQQASGRQQT | 575 | 1.458 | 3.179 | 0.943 | 0.991 |
| GSGQNQQPHLKSLT | 576 | 1.457 | 5.016 | 1.096 | 0.740 |
| GPPQHMTSGQNQQT | 577 | 1.457 | 1.547 | 0.509 | 0.677 |
| GSGQNQQASLPSRT | 578 | 1.456 | 0.389 | 0.930 | 0.673 |
| GSGQIVSTQTNQQT | 579 | 1.456 | 1.103 | 0.453 | 0.512 |
| GSGKGHSAGQNQQT | 580 | 1.453 | 0.936 | 1.035 | 1.173 |
| GSGQNTRLQLGQQT | 581 | 1.452 | 1.747 | 0.181 | 0.234 |
| GSVGSRPVGQNQQT | 582 | 1.442 | 11.363 | 1.182 | 0.716 |
| GSSHTLALGQNQQT | 583 | 1.441 | 7.071 | 0.851 | 0.406 |
| GMYEYSQSGQNQQT | 584 | 1.438 | 0.000 | 1.410 | 0.448 |
| GNGQNQQHSILHGT | 585 | 1.435 | 0.000 | 0.777 | 0.415 |
| GSGYNQPHLQNQQT | 586 | 1.435 | 4.512 | 0.711 | 0.395 |
| GPLVNASSGQNQQT | 587 | 1.434 | 5.239 | 0.831 | 0.343 |
| GSGQNQQVLTTART | 588 | 1.434 | 4.142 | 1.071 | 0.948 |
| GSGQNQHSVHNDQT | 589 | 1.428 | 0.000 | 0.521 | 0.515 |
| GAGLIMHSGQNQQT | 590 | 1.425 | 1.408 | 0.565 | 0.511 |
| GMGRHSASGQNQQT | 591 | 1.417 | 6.500 | 0.470 | 0.389 |
| GSHSQSGHGQNQQT | 592 | 1.413 | 1.240 | 0.696 | 0.318 |
| GSSTTIVSGQNHQT | 593 | 1.411 | 0.000 | 0.993 | 0.672 |
| GRHLVTASGQNQQT | 594 | 1.411 | 2.885 | 0.648 | 0.404 |
| GSGQNQQHANLNQT | 595 | 1.410 | 0.094 | 0.416 | 0.544 |
| GSGSTHSKAQNQQT | 596 | 1.410 | 0.515 | 0.921 | 0.801 |
| GSGQNKQMLSGNTT | 597 | 1.410 | 2.219 | 1.074 | 0.404 |
| GSGQVHNPTQNQQT | 598 | 1.410 | 2.488 | 1.021 | 0.542 |
| GSGQNQQIPHVHQT | 599 | 1.409 | 0.768 | 0.576 | 0.218 |
| GSLHAGLSGQNQQT | 600 | 1.408 | 1.739 | 1.286 | 0.936 |
| GPAQHGTSGQNQQT | 601 | 1.407 | 0.866 | 1.030 | 0.615 |
| GEKAVTSSGQNQQT | 602 | 1.402 | 0.998 | 0.558 | 0.327 |
| GSGQNQQTMANGQR | 603 | 1.394 | 0.216 | 1.169 | 1.230 |
| GSGSPHSKDQNQQT | 604 | 1.394 | 0.000 | 2.041 | 4.680 |
| GSFSMGYGGQNQQT | 605 | 1.393 | 18.476 | 1.908 | 1.030 |
| GSGTHLVSLQNQQT | 606 | 1.392 | 0.000 | 0.715 | 1.167 |
| GSGQMQPHVQNQQT | 607 | 1.389 | 9.381 | 0.387 | 0.153 |
| GSGQNQQVAGLNNT | 608 | 1.386 | 3.218 | 0.449 | 0.492 |
| GSSQNQQHDMRLRT | 609 | 1.386 | 2.645 | 0.669 | 0.552 |
| GPASLPISGQNQQT | 610 | 1.386 | 9.008 | 0.312 | 0.155 |
| GSGQNQQPPLATRT | 611 | 1.386 | 2.295 | 0.593 | 0.287 |
| GSSRVPVSGQNQQT | 612 | 1.385 | 13.191 | 0.870 | 0.485 |
| GSGQNQQTNLGHTT | 613 | 1.383 | 1.523 | 1.343 | 1.281 |
| GSGQNQQLVSRVQT | 614 | 1.381 | 1.195 | 0.656 | 0.466 |
| GPNSYPVSGQKQQT | 615 | 1.381 | 4.040 | 0.736 | 0.834 |
| GHAHYQASGQNQQT | 616 | 1.377 | 7.299 | 0.803 | 0.745 |
| GSGQALLSTGNQQT | 617 | 1.377 | 0.847 | 0.536 | 0.370 |
| GSGQLPRQMTNQQT | 618 | 1.376 | 3.550 | 0.400 | 0.562 |
| GSGFPKSTEQNQQT | 619 | 1.376 | 2.058 | 0.610 | 0.194 |
| GSRETSLSGQNQQT | 620 | 1.373 | 5.193 | 1.364 | 0.203 |
| GSGQNQQGTGVSHT | 621 | 1.371 | 4.295 | 1.417 | 0.749 |
| GSRTVPVYGQNQQT | 622 | 1.371 | 0.363 | 1.226 | 0.969 |
| GSNAQSAHGQNQQT | 623 | 1.371 | 0.888 | 0.976 | 0.245 |
| GAFHLAASGQNQQT | 624 | 1.369 | 18.165 | 0.994 | 0.775 |
| GSGQYRSSSDNQQT | 625 | 1.369 | 6.209 | 0.681 | 0.409 |
| GSGQVYISTPNQQT | 626 | 1.367 | 0.000 | 0.859 | 0.282 |
| GSGVSTQLLQNQQT | 627 | 1.367 | 2.467 | 0.928 | 0.509 |
| GSGQLGLSVTNQQT | 628 | 1.364 | 6.906 | 1.395 | 0.376 |
| GSGSNMRLSQNQQT | 629 | 1.363 | 0.588 | 0.962 | 0.730 |
| GSGQNLHSGLPQQT | 630 | 1.363 | 1.594 | 1.054 | 0.592 |
| GSSHTLALGQNKQT | 631 | 1.362 | 2.160 | 0.838 | 0.643 |
| GSGQNQHSLPAHRT | 632 | 1.361 | 0.700 | 0.911 | 0.742 |
| GSGQNQGTVYPNQT | 633 | 1.358 | 7.648 | 0.835 | 0.815 |
| GSGQNQQPSLRQST | 634 | 1.356 | 2.905 | 1.315 | 0.554 |
| GSGQNARLKDNQQT | 635 | 1.354 | 2.395 | 0.580 | 0.938 |
| GHAGSTGSGQNQQT | 636 | 1.352 | 2.829 | 1.332 | 1.233 |
| GSGQALSSSGNQQT | 637 | 1.351 | 6.860 | 0.894 | 0.931 |
| GSGASESHRQNQQT | 638 | 1.350 | 0.850 | 0.325 | 0.313 |
| GVGVITSSGQNQQT | 639 | 1.348 | 0.918 | 1.296 | 0.777 |
| GSLYGQSLGQNQQT | 640 | 1.348 | 11.248 | 0.894 | 0.843 |
| GSGQMSDVHGNQQT | 641 | 1.346 | 7.172 | 0.408 | 0.548 |
| GSGQNQQHSSKATT | 642 | 1.345 | 12.248 | 1.350 | 1.401 |
| GSGQNQQTSVSQQT | 643 | 1.342 | 1.614 | 1.030 | 0.913 |
| GSGQKMWKLDNQQT | 644 | 1.341 | 0.000 | 0.990 | 1.418 |
| GSGQNVSMQVNQQT | 645 | 1.341 | 0.000 | 0.357 | 0.251 |
| GSGQNQRATLSNQT | 646 | 1.339 | 1.084 | 0.947 | 0.723 |
| GSGQASSKSANQQT | 647 | 1.339 | 1.138 | 0.500 | 0.175 |
| GSGKNQTPIPKGQT | 648 | 1.339 | 5.077 | 1.306 | 1.154 |
| GSGQNQQTRQEGST | 649 | 1.339 | 0.000 | 0.645 | 0.718 |
| GASSLATSGQNQQT | 650 | 1.337 | 0.703 | 0.423 | 0.217 |
| GSGQRGSLTENQQT | 651 | 1.337 | 2.482 | 0.300 | 0.567 |
| GSEQTRQRGQNQQT | 652 | 1.333 | 2.172 | 0.574 | 0.815 |
| GSGQNQQTLTASKE | 653 | 1.333 | 1.152 | 0.981 | 1.172 |
| GSGTSGKTGKNQQT | 654 | 1.333 | 4.033 | 0.358 | 0.676 |
| GQLVTFTSGQNQQT | 655 | 1.331 | 11.282 | 0.819 | 0.294 |
| GSGQNQQSANKILT | 656 | 1.331 | 3.789 | 0.894 | 1.236 |
| GSGQNQQHHSSHTT | 657 | 1.328 | 2.158 | 0.957 | 0.452 |
| GSGQNQKGMQPNQT | 658 | 1.326 | 3.139 | 0.775 | 1.059 |
| GSGQLVSGLYNQQT | 659 | 1.325 | 0.000 | 0.842 | 0.733 |
| GSSVGVPSGQNQQT | 660 | 1.322 | 4.867 | 0.336 | 1.157 |
| GSGQNQQWDSRRQT | 661 | 1.321 | 0.531 | 1.059 | 0.825 |
| GSEQTRQSGQNQQT | 662 | 1.321 | 0.514 | 0.734 | 0.900 |
| GSGIGSHIPQNQQT | 663 | 1.319 | 0.173 | 0.822 | 0.597 |
| GSGQNQRLHGVDQT | 664 | 1.318 | 4.655 | 0.459 | 0.341 |
| GEVSRVLSGQNQQT | 665 | 1.318 | 0.437 | 1.150 | 0.440 |
| GSGQNQQKVSPLLT | 666 | 1.314 | 1.602 | 0.755 | 0.806 |
| GSGLALERSQNQQT | 667 | 1.311 | 0.486 | 0.618 | 0.096 |
| GPDRIGSSGQNQQT | 668 | 1.308 | 0.426 | 0.654 | 0.342 |
| GSGQNQDHQNKQQT | 669 | 1.308 | 1.470 | 0.510 | 0.761 |
| GSGQNQQTALYNNT | 670 | 1.307 | 0.862 | 0.660 | 0.726 |
| GSGAVHLTAQNQQT | 671 | 1.306 | 1.668 | 0.541 | 0.466 |
| GSLVSTQSGQNQQT | 672 | 1.305 | 1.293 | 1.282 | 0.650 |
| GSGVSARMVQNQQT | 673 | 1.299 | 0.624 | 0.870 | 0.697 |
| GSGQTRMPLANQQT | 674 | 1.296 | 0.790 | 0.447 | 0.273 |
| GSGISSRNMQNQQT | 675 | 1.291 | 6.328 | 1.671 | 0.560 |
| GSGEKVHSGQNQQT | 676 | 1.289 | 0.062 | 0.862 | 0.671 |
| GSGQNQQKLSSMST | 677 | 1.286 | 1.586 | 1.160 | 1.052 |
| GSGQNQQTGQHMRV | 678 | 1.286 | 4.161 | 1.839 | 1.635 |
| GSGMIHTTAQNQQT | 679 | 1.285 | 0.105 | 0.678 | 0.276 |
| GSGQNWPALKGQQT | 680 | 1.284 | 2.031 | 1.101 | 1.222 |
| GASHMSISGQNQQT | 681 | 1.284 | 0.462 | 0.404 | 0.374 |
| GSDQNQQLGYSKQT | 682 | 1.283 | 0.000 | 0.853 | 0.660 |
| GIPSIRESGQNQQT | 683 | 1.282 | 0.166 | 0.484 | 0.254 |
| GSGIPSVKFQNQQT | 684 | 1.281 | 0.061 | 0.364 | 0.561 |
| GSGQNQQTSVSQNV | 685 | 1.281 | 0.750 | 0.788 | 0.715 |
| GSGQNQQIGESRMT | 686 | 1.279 | 0.103 | 0.890 | 0.453 |
| GSGSSSMSFQNQQT | 687 | 1.279 | 0.540 | 0.466 | 0.095 |
| GSGQKQERAVSKQT | 688 | 1.277 | 0.000 | 1.174 | 0.732 |
| GCTTRLNSGQNQQT | 689 | 1.276 | 0.000 | 0.184 | 0.618 |
| GSGQNQQIISTKIT | 690 | 1.275 | 0.000 | 0.951 | 0.710 |
| GSGQNQQKSLNGNT | 691 | 1.275 | 8.573 | 0.586 | 0.851 |
| GSGIPAPRLQNQQT | 692 | 1.273 | 4.162 | 0.583 | 0.396 |
| GSGQIRESMGNQQT | 693 | 1.270 | 1.676 | 0.833 | 0.523 |
| GSGQNSGVHFNQQT | 694 | 1.268 | 0.587 | 0.871 | 0.377 |
| GSGQNIGHSLPQQT | 695 | 1.264 | 6.183 | 0.740 | 0.478 |
| GSGERSISVQNQQT | 696 | 1.264 | 1.619 | 0.598 | 0.173 |
| GSGLKPNVLQNQQT | 697 | 1.263 | 0.975 | 0.701 | 0.268 |
| GSGQVAYAQGNQQT | 698 | 1.259 | 1.309 | 0.734 | 0.313 |
| GSGQSSYGSGNQQT | 699 | 1.257 | 1.686 | 1.161 | 0.456 |
| GSGQNQAMTHGDQT | 700 | 1.257 | 1.878 | 0.357 | 0.259 |
| GSGQNQALVSMGQT | 701 | 1.255 | 1.876 | 0.987 | 0.560 |
| GSGQNPSFMRGQQT | 702 | 1.252 | 1.454 | 1.293 | 1.094 |
| GSGQNQQSHLRTNT | 703 | 1.251 | 4.583 | 1.022 | 0.718 |
| GYTRLETSGQNQQT | 704 | 1.250 | 1.323 | 0.841 | 0.297 |
| GSGQSYDMRGNQQT | 705 | 1.248 | 0.567 | 0.588 | 0.368 |
| GSRTTQDIGQNQQT | 706 | 1.247 | 0.000 | 0.685 | 0.280 |
| GSGHPYKAAQNQQT | 707 | 1.246 | 0.000 | 0.872 | 0.507 |
| GRLSNAHGGQNQQT | 708 | 1.245 | 0.839 | 1.036 | 0.725 |
| GSGQNQRAVLNDQT | 709 | 1.242 | 3.023 | 0.556 | 0.259 |
| GGSHTYGGGQNQQT | 710 | 1.241 | 13.065 | 0.982 | 0.730 |
| GSSVNSMIGQNQQT | 711 | 1.239 | 0.000 | 0.976 | 0.580 |
| GNSSMMGSGQNQQT | 712 | 1.239 | 3.856 | 0.656 | 0.364 |
| GNRDRPSSGQNQQT | 713 | 1.239 | 3.947 | 0.298 | 0.178 |
| GSGNMHASRQNQQT | 714 | 1.238 | 3.878 | 0.782 | 0.687 |
| GFIFPKVSGQNQQT | 715 | 1.237 | 0.000 | 1.764 | 0.692 |
| GSGQNQQLKNSTST | 716 | 1.235 | 1.703 | 1.063 | 0.538 |
| GSGQNQQSQYMPRT | 717 | 1.234 | 0.401 | 0.549 | 0.520 |
| GSGQRMADIGNQQT | 718 | 1.233 | 2.539 | 0.352 | 0.427 |
| GSGQNQSHYPSQQT | 719 | 1.228 | 4.315 | 0.644 | 0.402 |
| GSDGKMHRGQNQQT | 720 | 1.227 | 0.000 | 1.826 | 0.776 |
| GSGSVGFIGQNQQT | 721 | 1.227 | 8.261 | 0.689 | 0.445 |
| GLHGMTLSGQNQQT | 722 | 1.226 | 3.552 | 0.470 | 0.338 |
| GSDQSKRGDSNQQT | 723 | 1.225 | 0.639 | 0.479 | 0.267 |
| GSLFLATGGQNQQT | 724 | 1.220 | 0.000 | 0.775 | 0.485 |
| GSGQNQQPSAFSKT | 725 | 1.220 | 4.906 | 1.309 | 0.754 |
| GSGQLPQSGLNQQT | 726 | 1.218 | 1.504 | 0.641 | 0.318 |
| GSGSKQNALQNQQT | 727 | 1.216 | 2.010 | 0.941 | 0.594 |
| GSGQRRELSQNQQT | 728 | 1.215 | 1.791 | 0.622 | 0.396 |
| GSGQREPKASNQQT | 729 | 1.214 | 2.793 | 0.399 | 0.520 |
| GSGQNQQHPSTQQT | 730 | 1.205 | 1.552 | 1.017 | 0.680 |
| GSQSTLGLGQNQQT | 731 | 1.204 | 3.246 | 0.594 | 0.400 |
| GSGQNQQMPGLSST | 732 | 1.204 | 1.887 | 0.234 | 0.181 |
| GSGQNQQTVGGKNL | 733 | 1.203 | 0.128 | 0.777 | 1.051 |
| GSSREFHSGQNQQT | 734 | 1.203 | 1.591 | 0.688 | 0.474 |
| GSGQNQQTVPSNLV | 735 | 1.201 | 0.791 | 0.434 | 0.281 |
| GSGQNAYSSQAQQT | 736 | 1.201 | 12.096 | 0.629 | 0.216 |
| GSGQNKDHSTRRQT | 737 | 1.197 | 0.000 | 0.384 | 0.477 |
| GQLGSVGSGQDQQT | 738 | 1.196 | 0.000 | 1.020 | 0.437 |
| GSGQHAAPGHNQQT | 739 | 1.195 | 5.999 | 0.600 | 0.199 |
| GSGQNQQTSQSPPT | 740 | 1.194 | 1.208 | 0.851 | 0.478 |
| GSGNYRDHEQNQQT | 741 | 1.193 | 7.389 | 0.287 | 0.222 |
| GSGQHSNQHVNQQT | 742 | 1.192 | 1.453 | 0.955 | 0.558 |
| GSGQTARNGINQQT | 743 | 1.192 | 2.030 | 1.002 | 0.472 |
| GSGQNQQHYGSQGT | 744 | 1.189 | 0.453 | 1.345 | 0.379 |
| GSGSPQASRQNQQT | 745 | 1.189 | 6.782 | 0.923 | 0.542 |
| GSGFSHSMGKNQQT | 746 | 1.188 | 9.809 | 1.381 | 0.611 |
| GSGQSHSLETNQQT | 747 | 1.188 | 1.319 | 0.520 | 0.363 |
| GTEQTRQSGQNQQT | 748 | 1.188 | 0.132 | 0.756 | 0.756 |
| GSGRHLASVQNQQT | 749 | 1.187 | 1.024 | 0.654 | 0.606 |
| GLGSKNHSGQNQQT | 750 | 1.187 | 5.046 | 0.825 | 0.224 |
| GSGQNQQTSHFPSA | 751 | 1.185 | 0.325 | 0.969 | 0.907 |
| GSGQLSGTPQNQQT | 752 | 1.185 | 1.382 | 1.025 | 0.643 |
| GSGQNQQAPHKKET | 753 | 1.180 | 0.598 | 0.994 | 0.689 |
| GSGQNQQTLRGSLE | 754 | 1.179 | 1.812 | 0.853 | 0.354 |
| GSIAMTSHGQNQQT | 755 | 1.178 | 1.435 | 0.551 | 0.438 |
| GSPGVSPSGQNQQT | 756 | 1.178 | 3.006 | 0.853 | 1.160 |
| GSGQNQQTGSSSRV | 757 | 1.176 | 0.580 | 0.995 | 1.128 |
| GSGQHLPLLGNQQT | 758 | 1.175 | 1.739 | 0.519 | 0.347 |
| GSDHSHRGGQNQQT | 759 | 1.174 | 0.504 | 0.818 | 0.331 |
| GSGIVTKLGQNQQT | 760 | 1.174 | 10.571 | 0.599 | 0.242 |
| GSGQDVTKTGNQQT | 761 | 1.173 | 4.523 | 0.531 | 0.035 |
| GSGQNQQSHGRIGT | 762 | 1.173 | 5.117 | 0.607 | 0.455 |
| GSGQNQQINHRSPT | 763 | 1.173 | 0.748 | 0.259 | 0.220 |
| GSGDDSRVGQNQQT | 764 | 1.172 | 0.191 | 0.466 | 0.156 |
| GSGQSTLKRINQQT | 765 | 1.168 | 13.442 | 0.534 | 1.184 |
| GSGSQHSKAQNQQT | 766 | 1.168 | 0.312 | 0.638 | 0.916 |
| GSGQNQQHASSNNT | 767 | 1.166 | 7.155 | 0.789 | 0.896 |
| GSRTYQVSGQNQQT | 768 | 1.164 | 1.853 | 0.638 | 0.641 |
| GSGQNQGLLSSPQT | 769 | 1.164 | 0.000 | 0.707 | 0.417 |
| GSGGGLQHNQNQQT | 770 | 1.163 | 4.098 | 1.137 | 0.778 |
| GSGQNQQTTAATRM | 771 | 1.163 | 3.925 | 0.947 | 1.005 |
| GSGQNQRASILVQT | 772 | 1.162 | 3.632 | 0.531 | 0.569 |
| GSGQNLGLLGAQQT | 773 | 1.161 | 1.458 | 0.524 | 0.226 |
| GSLDLGRSGQNQQT | 774 | 1.160 | 3.283 | 1.002 | 0.505 |
| GNSQVKVSGQNQQT | 775 | 1.158 | 4.930 | 1.422 | 0.728 |
| GSSGSHQYGQNQQT | 776 | 1.155 | 0.000 | 1.129 | 0.794 |
| GSGQNQQQRDGTLT | 777 | 1.152 | 0.387 | 0.760 | 0.730 |
| GRGQHVSVANNQQT | 778 | 1.152 | 1.896 | 1.032 | 0.589 |
| GDSSSRISGQNQQT | 779 | 1.151 | 3.787 | 0.916 | 0.348 |
| GSGQNQQHSLSSQT | 780 | 1.150 | 3.844 | 0.700 | 0.730 |
| GSLMDVHRGQNQQT | 781 | 1.150 | 0.387 | 1.009 | 0.238 |
| GSIQYQSSGQNQQT | 782 | 1.147 | 2.601 | 1.074 | 1.191 |
| GLGSKNPSGQNQQT | 783 | 1.147 | 1.629 | 1.184 | 0.424 |
| GSGQLVLTLQNQQT | 784 | 1.143 | 0.000 | 0.336 | 0.336 |
| GSGQNQQTSQPLPG | 785 | 1.141 | 0.080 | 0.748 | 0.530 |
| GSGQNQQNLGKLNT | 786 | 1.141 | 0.000 | 0.919 | 0.687 |
| GTTAHQPSGQNQQT | 787 | 1.138 | 0.211 | 0.726 | 0.275 |
| GSGQNRAQIGTQQT | 788 | 1.138 | 0.469 | 0.776 | 0.654 |
| GSGQYVHVSSNQQT | 789 | 1.137 | 1.803 | 0.739 | 0.366 |
| GSGQNQQTAHAFNI | 790 | 1.132 | 3.404 | 0.699 | 0.729 |
| GSGQNQRTMVATQT | 791 | 1.130 | 1.122 | 0.649 | 0.554 |
| GSGQNPIRGAMQQT | 792 | 1.126 | 1.327 | 1.296 | 0.427 |
| GSGYVITGSQNQQT | 793 | 1.125 | 6.271 | 0.971 | 0.248 |
| GRGPKQSNIQNQQT | 794 | 1.125 | 0.737 | 0.771 | 2.490 |
| GSGQNQQTMLGKPC | 795 | 1.125 | 0.047 | 1.090 | 0.992 |
| GSGQNQQVGSTVRT | 796 | 1.124 | 2.040 | 0.918 | 0.614 |
| GNVTTQKSGQNQQT | 797 | 1.122 | 2.546 | 1.215 | 0.922 |
| GSGNPVSHLQNQQT | 798 | 1.121 | 1.037 | 0.583 | 0.310 |
| GSLSHMESGQNQQT | 799 | 1.120 | 0.829 | 0.489 | 0.265 |
| GRAPTNLSGQNQQT | 800 | 1.118 | 0.687 | 0.757 | 0.169 |
| GSGQNQQTVMTARA | 801 | 1.117 | 1.535 | 0.995 | 0.843 |
| GSGMPASRLQNQQT | 802 | 1.117 | 1.689 | 0.790 | 0.372 |
| GVVRNHQSGQNQQT | 803 | 1.116 | 5.801 | 0.899 | 0.868 |
| GSGQNQHSVQVRQT | 804 | 1.116 | 1.909 | 0.782 | 0.916 |
| GSGQNTGHLTMQQT | 805 | 1.114 | 0.078 | 1.026 | 0.595 |
| GSGQNQQYAGKILT | 806 | 1.112 | 0.300 | 1.078 | 0.431 |
| GSGNPHVRNQNQQT | 807 | 1.112 | 0.873 | 0.732 | 0.755 |
| GSGQNGGSSNRQQT | 808 | 1.109 | 2.594 | 1.255 | 0.844 |
| GSGQRLSQGVNHQT | 809 | 1.108 | 3.394 | 0.931 | 1.141 |
| GSGQNAHAKEGQQT | 810 | 1.108 | 0.000 | 0.875 | 1.179 |
| GSSPAPNSGQNQQT | 811 | 1.106 | 2.229 | 0.719 | 0.368 |
| GLAHKTSSGQNQQT | 812 | 1.106 | 0.915 | 0.427 | 0.690 |
| GSGQNQQTPGAHKT | 813 | 1.105 | 3.827 | 0.957 | 0.277 |
| GSGQNQQSLSGSFT | 814 | 1.105 | 0.735 | 0.745 | 0.883 |
| GSGQNQQSTGTSRT | 815 | 1.103 | 4.054 | 1.209 | 0.935 |
| GSGQNQQTVQSNLV | 816 | 1.103 | 2.350 | 0.577 | 0.698 |
| GSGQNQQLGSRQCT | 817 | 1.102 | 0.183 | 0.987 | 0.407 |
| GSGQNQYLRLELQT | 818 | 1.101 | 0.000 | 0.416 | 0.839 |
| GSGQNQQTSPRLQT | 819 | 1.100 | 0.795 | 1.156 | 1.091 |
| GSGQNQQTTSSNMT | 820 | 1.099 | 0.569 | 0.638 | 0.698 |
| GTASTYNSGQNQQT | 821 | 1.099 | 2.560 | 0.250 | 0.625 |
| GSGQNQQTMPQHKI | 822 | 1.097 | 2.394 | 0.479 | 0.197 |
| GSGQSHLHTGNQQT | 823 | 1.096 | 2.584 | 0.721 | 0.295 |
| GVKGVGHSGQNQQT | 824 | 1.096 | 2.485 | 0.994 | 0.783 |
| GSGKVTKQSQNQQT | 825 | 1.095 | 0.000 | 0.928 | 1.035 |
| GSGQNQQTALEKSL | 826 | 1.092 | 0.000 | 0.625 | 0.702 |
| GSGYKDTYGQNQQT | 827 | 1.091 | 0.854 | 0.717 | 0.448 |
| GSGQNQQSGTFLST | 828 | 1.090 | 5.673 | 1.021 | 0.742 |
| GSGQNTGQHMMQQT | 829 | 1.090 | 1.058 | 1.147 | 0.917 |
| GSGKNQQRPGLDQT | 830 | 1.089 | 1.557 | 0.583 | 0.385 |
| GSGQSREISLNQQT | 831 | 1.088 | 6.954 | 0.594 | 0.282 |
| GTPTSPSSGQNQQT | 832 | 1.086 | 4.558 | 0.833 | 0.662 |
| GKPAGGLSGQNQQT | 833 | 1.085 | 2.805 | 0.708 | 0.739 |
| GSGQNHRSADMQQT | 834 | 1.084 | 12.001 | 0.417 | 0.212 |
| GSGQNQQTLPSLSL | 835 | 1.084 | 1.758 | 0.527 | 0.175 |
| GSPYMGATGQNQQT | 836 | 1.083 | 5.364 | 0.918 | 0.254 |
| GSGHAKAVGQNQQT | 837 | 1.081 | 4.357 | 0.703 | 0.824 |
| GHMKGVTSGQNQQT | 838 | 1.081 | 2.814 | 0.807 | 0.413 |
| GSGQNQKILTLDQT | 839 | 1.080 | 0.371 | 0.291 | 0.314 |
| GSGQNQQTKVGHSA | 840 | 1.079 | 1.256 | 0.669 | 1.019 |
| GIARTTISGQNQQT | 841 | 1.078 | 1.783 | 0.819 | 0.330 |
| GSGQNQQTSVGERT | 842 | 1.077 | 3.737 | 0.648 | 0.534 |
| GSGQNQQTMIANIR | 843 | 1.076 | 0.000 | 0.379 | 0.458 |
| GDMTRSSSGQNQQT | 844 | 1.075 | 0.802 | 1.145 | 1.038 |
| GSGHMSDLRQNQQT | 845 | 1.073 | 4.291 | 0.555 | 0.328 |
| GRGAVMASGQNQQT | 846 | 1.072 | 0.923 | 0.783 | 0.605 |
| GSGQNQQLSGKSVT | 847 | 1.070 | 1.524 | 1.276 | 0.930 |
| GSHTLVVSGQNQQT | 848 | 1.069 | 1.535 | 0.671 | 0.748 |
| GSGPWSAGLQNQQT | 849 | 1.067 | 0.947 | 0.700 | 0.539 |
| GSGQHSPHALNQQT | 850 | 1.064 | 1.412 | 0.885 | 0.573 |
| GSGQNQQPNSGSMT | 851 | 1.064 | 0.925 | 0.588 | 0.339 |
| GSGLAHLGGQNQQT | 852 | 1.064 | 2.191 | 0.749 | 0.794 |
| GSSVRYEPKQNQQT | 853 | 1.063 | 1.564 | 0.450 | 0.501 |
| GSGQNQQARPLELT | 854 | 1.061 | 0.059 | 0.389 | 0.252 |
| GSGQPRSTGINQQT | 855 | 1.061 | 0.693 | 0.650 | 0.542 |
| GSGQNQANWVKVQT | 856 | 1.059 | 0.126 | 0.683 | 0.532 |
| GSGHLFQSGQNQQT | 857 | 1.057 | 0.615 | 0.751 | 0.386 |
| GSGQNRGISISQQT | 858 | 1.057 | 2.166 | 0.686 | 0.566 |
| GSGTHYDNRQNQQT | 859 | 1.054 | 0.072 | 0.612 | 0.486 |
| GSGQNQQTSTTPLP | 860 | 1.052 | 2.823 | 0.828 | 0.741 |
| GSGQVHASQVNQKT | 861 | 1.049 | 0.503 | 0.855 | 0.767 |
| GSSGHRESGQNQQT | 862 | 1.048 | 4.398 | 0.641 | 0.691 |
| GLSAEKSSGQNQQT | 863 | 1.047 | 7.203 | 0.629 | 0.303 |
| GSGQEHRSLANQQT | 864 | 1.046 | 0.000 | 0.507 | 0.344 |
| GSGQTVVRIANQQT | 865 | 1.046 | 4.156 | 0.661 | 0.390 |
| GSGQNVSSVHRQQT | 866 | 1.045 | 0.712 | 0.383 | 0.271 |
| GSGASRMSIQNQQT | 867 | 1.045 | 0.111 | 0.801 | 0.417 |
| GVAFIGSSGQNQQT | 868 | 1.043 | 0.000 | 0.744 | 0.648 |
| GSGQNQQTVPTRQT | 869 | 1.040 | 1.207 | 0.629 | 0.138 |
| GSGQAAKSSQNQQT | 870 | 1.036 | 0.681 | 0.778 | 0.737 |
| GSGQNQQVAIRTST | 871 | 1.035 | 2.447 | 0.963 | 0.370 |
| GSVHMQNAGQNQQT | 872 | 1.034 | 3.608 | 1.004 | 0.625 |
| GSGMRQAGVQNQQT | 873 | 1.032 | 0.811 | 0.736 | 0.775 |
| GSGQNQQVGGKTVT | 874 | 1.032 | 6.195 | 1.094 | 0.821 |
| GVHDMRVSGQNQQT | 875 | 1.032 | 8.083 | 1.171 | 0.818 |
| GSGQHVSVANNQQT | 876 | 1.029 | 5.734 | 0.974 | 0.577 |
| GSAAMSVRGQNQQT | 877 | 1.029 | 2.386 | 0.202 | 0.287 |
| GVSRGGPSGQNQQT | 878 | 1.028 | 1.611 | 0.750 | 0.591 |
| GSGQMVHTIGNQQT | 879 | 1.026 | 1.328 | 0.406 | 0.430 |
| GRGGSMAETQNQQT | 880 | 1.024 | 2.853 | 0.799 | 0.669 |
| GSGHTNPTRQNQQT | 881 | 1.021 | 0.688 | 0.726 | 0.807 |
| GSGEAARYEQNQQT | 882 | 1.020 | 0.000 | 0.107 | 0.125 |
| GSGQNERHLVLQQT | 883 | 1.019 | 5.354 | 0.416 | 0.150 |
| GSGQNQQSKQQVLT | 884 | 1.019 | 1.494 | 1.428 | 1.256 |
| GSGQARAHRGNQQT | 885 | 1.017 | 0.000 | 0.254 | 0.386 |
| GSGQNQQPLDTSRT | 886 | 1.015 | 0.775 | 0.491 | 0.376 |
| GSGQNQQLANMVTT | 887 | 1.014 | 1.739 | 1.253 | 0.987 |
| GSGQMKDLHRNQQT | 888 | 1.014 | 1.068 | 0.587 | 0.506 |
| GSGQNQHLSSFVQT | 889 | 1.013 | 0.110 | 1.090 | 0.364 |
| GSGQNQQPSSRVTT | 890 | 1.012 | 2.179 | 0.784 | 0.504 |
| GSGQNQQLAITLGT | 891 | 1.011 | 0.000 | 0.877 | 0.143 |
| GSGQNQQTVGNPAT | 892 | 1.008 | 3.014 | 0.856 | 0.395 |
| GSGQNQGRAHPMQT | 893 | 1.007 | 2.364 | 0.684 | 0.453 |
| GSGQLIASVVNQQT | 894 | 1.005 | 0.086 | 0.197 | 0.359 |
| GSSVRSLVGQNQQT | 895 | 1.004 | 3.840 | 0.412 | 0.608 |
| GGAGSAHSGQNQQT | 896 | 1.003 | 6.108 | 0.474 | 1.092 |
| GSDQNQQTMSSTRT | 897 | 1.003 | 2.428 | 1.306 | 0.835 |
| GSGQNQQMAGAFRT | 898 | 1.003 | 1.784 | 1.307 | 0.762 |
| GSLGNLQRGQNQQT | 899 | 1.003 | 0.895 | 0.947 | 0.385 |
| GSGPSISHGQNQQT | 900 | 1.000 | 0.000 | 0.614 | 0.665 |
| GSGQNQQT | 6406 | 1.000 | 1.000 | 1.000 | 1.000 |
| GSGQNQQSSFNVQT | 901 | 0.998 | 0.000 | 1.307 | 0.675 |
| GSGQNQQTGQATHN | 902 | 0.996 | 2.199 | 0.877 | 0.527 |

[1445] A second cross-species evolution screen was performed using an AAV capsid variant library with a modification in loop IV introduced as described above and passaging it once through NHPs (passage 1) and then subsequently injected it into two different strains of mice (passage 2), C57Bl/6 and BALB/c. The fold-enrichment for each variant in the brain of each mouse species was calculated by systematic NGS enrichment analysis following RNA recovery and RT-PCR amplification. The fold enrichment values in the second passage in mice were compared to those fold enrichment values from the second pass that was performed in NHPs as described above. As shown in Table 10, when comparing the second pass fold enrichment values in the mice versus NHPs, 12 variants were identified that had a fold-enrichment value greater than 10 in all three animal groups. Further, 10 of these 12 variants comprised the SPH motif and a positive residue in one of the next three subsequent residues (Table 10).

TABLE 10
NGS fold-enrichment of AAV capsid variants from a
second passage (P2) in NHPs or mice (C57Bl/6 or BALB/c)
following a first passage in NHPs

| | | Fold | Fold | Fold |
|---|---|---|---|---|
| | | enrichment | enrichment | enrichment |
| Peptide | SEQ | over AAV9 | over AAV9 | over AAV9 |
| Sequence | ID NO: | in NHP P2 | in BALB/c P2 | in C57Bl/6 P2 |
| VSGSPHSKAQNQQT | 903 | 99.76 | 92.99 | 34.29 |
| CSGSPHSKAQNQQT | 904 | 85.1 | 66.74 | 22.19 |
| GSGSPHSKAQNQQT | 200 | 56.33 | 44.58 | 14.48 |
| GSGSPHRKAQNQQT | 905 | 46.39 | 42.47 | 14.11 |
| GRGSPHSKAQNQQT | 906 | 43.68 | 59.65 | 28.13 |
| GHDSPHKSGQNQQT | 201 | 33.96 | 59.14 | 27.15 |
| GSGSPHSKAKNQQT | 208 | 31.27 | 41.51 | 14 |
| GSGSPHSKAQNKQT | 907 | 29.52 | 44.1 | 13.69 |
| GSGSPHSKAQTQQT | 908 | 24.27 | 41.75 | 18 |
| GQDSPHKSGQNQQT | 204 | 22.7 | 32.37 | 16.02 |
| GSGSTHASRQNQQT | 909 | 11.04 | 23.71 | 10.67 |
| GHDSQHKSGQNQQT | 404 | 10.36 | 21.3 | 13.55 |

[1446] Following the second passage in mice, a synthetic library was generated using those variants that demonstrated a fold-change in enrichment relative to wild-type AAV9 that was above 10 in the brain of either strain of mice, as measured by systematic NGS enrichment analysis following RNA recovery and RT-PCR amplification. There were approximately 500 variants in this synthetic library. This synthetic library was then injected back into both strains of mice (C57Bl/6 and BALB/c; passage 3). RNA was recovered from the mouse brains, RT-PCR amplification was performed, and fold-enrichment relative to wild-type AAV9 was calculated by NGS analysis, which is provided in Table 11. As shown in Table 11, the variants with the greatest fold-enrichment in the brain in each strain, were highly correlated across strains (R²=0.8458).

TABLE 11
NGS fold-enrichment of AAV capsid variants in the
brain from a third passage (P3) in mice (C57Bl/6 or BALB/c)
following a first and second passage in mice

| | | Fold | Fold | |
|---|---|---|---|---|
| | | enrichment | enrichment | |
| Peptide | SEQ | over AAV9 | over AAV9 | |
| Sequence | ID NO: | in BALB/c | in C57Bl/6 | Average |
| GSGSPHKYGQNQQT | 910 | 150.445 | 103.488 | 126.966 |
| GSGSPHKFGQNQQT | 911 | 73.364 | 60.304 | 66.834 |
| GHDSPHKSGQNQQT | 201 | 82.460 | 51.125 | 66.792 |
| GSGSPHSKAQNQQT | 200 | 60.312 | 65.853 | 63.083 |
| VSGSPHKFGQNQQT | 912 | 60.186 | 59.142 | 59.664 |
| GSGSPHSKAQNHQT | 913 | 63.486 | 51.647 | 57.566 |
| VSGSPHSKAQNQQT | 903 | 73.555 | 37.429 | 55.492 |
| GQDSPHKSGQNQQT | 204 | 63.898 | 43.752 | 53.825 |
| GSGSPHSKAQHQQT | 914 | 45.309 | 45.600 | 45.454 |
| GSGSPHKTYQNQQT | 915 | 50.283 | 35.460 | 42.871 |
| GSGSPHSKAQTQQT | 908 | 43.120 | 39.098 | 41.109 |
| VSGSPHASRQNQQT | 916 | 46.572 | 32.480 | 39.526 |
| GSGSPHSKAQNKQT | 907 | 39.848 | 35.596 | 37.722 |
| GSGSPHKFGKNQQT | 917 | 31.948 | 34.899 | 33.423 |
| GSGSPHASRQNQHT | 918 | 28.145 | 30.928 | 29.537 |
| GSHSPHKSGQNQQT | 919 | 22.948 | 35.412 | 29.180 |
| GSGQNQQRRMSPST | 920 | 4.576 | 53.520 | 29.048 |
| GSGSPHASRQNQQT | 205 | 28.866 | 29.139 | 29.003 |
| GSGSPHSKPQNQQT | 921 | 26.958 | 28.599 | 27.779 |
| GSGSPHKFGQKQQT | 922 | 39.597 | 14.927 | 27.262 |
| VSGSPHGARQNQQT | 923 | 30.985 | 22.634 | 26.810 |
| GSGSPHSKAQKQQT | 924 | 25.052 | 27.459 | 26.256 |
| GHSSPHRSGQNQQT | 212 | 16.982 | 35.081 | 26.032 |
| GSGSPHSKAKNQQT | 208 | 21.069 | 25.711 | 23.390 |
| GSHSPHKRGQNQQT | 925 | 24.054 | 20.262 | 22.158 |
| GRGSPHSKAQNQQT | 906 | 20.939 | 22.720 | 21.830 |
| GQSSPHRSGQNQQT | 229 | 9.916 | 26.608 | 18.262 |
| GSGQNRQRLKGLET | 926 | 3.937 | 31.022 | 17.480 |
| GSGSPHKLGQNQQT | 927 | 18.905 | 14.732 | 16.818 |
| GSGSPHKTSKNQQT | 928 | 14.654 | 17.606 | 16.130 |
| GSGSPHKIGQNQQT | 929 | 16.999 | 14.794 | 15.897 |
| GSGSPHKKNQNQQT | 209 | 25.633 | 5.605 | 15.619 |
| GSGSPHASRQNKQT | 206 | 10.738 | 20.347 | 15.542 |
| GSGSPHTRGQNQQT | 214 | 16.899 | 13.869 | 15.384 |
| GSGQDSPHVRNQQT | 930 | 15.340 | 14.646 | 14.993 |
| GSGSPHKTSQNQQT | 931 | 20.428 | 8.818 | 14.623 |
| GSGSPHASRKNQQT | 932 | 13.799 | 12.749 | 13.274 |
| GSGSPHASRQKQQT | 211 | 13.624 | 11.188 | 12.406 |
| GSHSPHKSGQKQQT | 933 | 6.700 | 17.736 | 12.218 |
| GSGSPHKTSQKQQT | 934 | 12.621 | 11.720 | 12.170 |
| GSGSPHVRGQNKQT | 935 | 13.174 | 11.017 | 12.095 |
| GSGSPHKTTQNQQT | 936 | 9.722 | 13.381 | 11.552 |
| CSGSPHSKAQNQQT | 904 | 11.772 | 9.447 | 10.610 |
| GSGPVRALRQNQQT | 937 | 3.369 | 17.431 | 10.400 |
| GSGSPHVRGQKQQT | 938 | 7.573 | 12.498 | 10.036 |
| GSGSPHRKAQNQQT | 905 | 12.308 | 7.349 | 9.828 |
| GRGSPHASRQNQQT | 318 | 11.903 | 6.780 | 9.342 |
| CSGSPHKTSQNQQT | 939 | 11.167 | 6.631 | 8.899 |
| CSHSPHKSGQNQQT | 940 | 11.356 | 6.304 | 8.830 |
| GSGSPHSKDQNQQT | 604 | 3.492 | 10.236 | 6.864 |

[1447] Taken together, these results demonstrate that after 3 rounds of screening of this AAV9 variant library with loop IV modifications in NHP and mice, many AAV capsid variants outperformed the wild-type AAV9, for example, in penetration of the blood brain barrier (BBB) and spinal cord expression. These capsid variants were able to cross-species, evidenced by expression and tropism in the NHP brain/spinal cord as well as in the brain of two different mouse species.

### Example 11. Individual Capsid Characterization in Mice

[1448] The goal of these experiments was to determine the transduction level, tropism, ability to cross the blood brain barrier, and overall spatial distribution in the central nervous system (CNS) of 2 capsid variants selected from the study described in Example 1 relative to AAV9 following intravenous injection in mice. The 2 capsid variants were TTM-001 (SEQ ID NO: 981 (amino acid) and 983 (DNA), comprising SEQ ID NO: 941) and TTM-002 (SEQ ID NO: 982 (amino acid) and 984 (DNA), comprising SEQ ID NO: 2), as outlined in Table 3 above. The amino acid and DNA sequences of TTM-001 and TTM-002 are provided. e.g., in Tables 4 and 5, respectively.

[1449] AAV particles were generated with each of these capsid variants encapsulating a luciferase-EGFP transgene driven by a CMV/chicken beta actin promoter in a single stranded viral genome. Each capsid variant and AAV9 control were tested by intravenously administering by tail vein injection, the AAV particle formulation at 5e11 VG/dose (2.5E13 vg/kg) to three female BALB/c mice. The in-life period was 28 days and then various CNS and peripheral tissues were collected for measuring transgene mRNA, transgene protein, and viral DNA (biodistribution).

[1450] At 28 days post-injection of the AAV particles encapsulated in the TTM-001 capsid variant (AAV_TTM-001), mice were injected with luciferin and their brains were harvested for IVIS imaging. Robust luciferase signal was observed in mice injected with AAV particles encapsulated in the TTM-001 capsid variant, and this was greatly increased relative to AAV particles encapsulated in the wild-type AAV9 control capsid.

[1451] The brains isolated from mice injected with the AAV particles encapsulated in the TTM-001 capsid variant (AAV_TTM-001) or the TTM-002 capsid variant (AAV_TTM-002) were assayed by qPCR for the presence of transgene RNA as a measure of transgene expression, and the presence of viral DNA as a measure of viral genome levels. Data were provided as fold over AAV9 (Table 12). As shown in Table 12, when compared to the wild-type AAV9 capsid control, TTM-001 and TTM-002 demonstrated a 30-fold and 66-fold increase, respectively, in transgene mRNA levels and expression in the brain, indicative of enhanced payload delivery. This correlated with a 32-fold (TTM-001) and 47-fold (TTM-002) increase, respectively, in viral genome (DNA) concentrations in the brain relative to the AAV9 capsid control, which is indicative of enhanced CNS tropism and transduction (Table 12).

TABLE 12
Transgene mRNA and viral genome levels (DNA)
in mice relative to the AAV9 control

| Measure | Tissue | AAV9 | TTM-001 | TTM-002 |
|---|---|---|---|---|
| mRNA | Brain | 1.0 | 30.4503 | 66.2161 |
| (transgene expression) | | | | |
| DNA | Brain | 1.0 | 32.0315 | 47.2810 |
| (viral genome quantification) | | | | |
| mRNA | Liver | 1.0 | 1.2356 | 0.2016 |
| (transgene expression) | | | | |
| DNA | Liver | 1.0 | 0.4802 | 0.0277 |
| (viral genome quantification) | | | | |

[1452] The brain tissues and spinal cords of the mice were also subjected to anti-GFP immunohistochemistry staining to evaluate overall CNS tropism and biodistribution. Immunohistochemical staining correlated with the qPCR analysis, as TTM-001 and TTM-002 showed significantly stronger staining and payload expression in the brain and spinal cord, as compared to the AAV9 control. More specifically, TTM-001 and TTM-02 demonstrated localization and strong payload expression and transduction in the mid-brain region, with increased staining observed in the hippocampus and thalamus, as well as in the brain stem, compared to AAV9. Less staining was observed in the cortical regions of the brain compared to the midbrain. However, staining in these cortical regions was stronger for TTM-001 and TTM-002 compared to the AAV9 control. It also appeared that the TTM-001 and TTM-002 capsid variants were able to transduce non-neuronal cells, including glial cells and oligodendrocytes. With respect to the spinal cord, staining and payload expression for TTM-01 and TTM-002 were localized to the ventral horns of the grey matter.

[1453] Peripheral tissues were also isolated from the mice intravenously injected with the AAAV particles encapsulated in the TTM-001 capsid variant or the TTM-002 capsid variant for analysis by qPCR and/or GFP immunohistochemical staining. Transgene mRNA levels and viral genome DNA levels were quantified in the liver by qPCR and the fold over AAV9 was calculated for each capsid variant (Table 12). TTM-001 resulted in similar levels of payload expression (mRNA levels) as compared to wild-type AAV9, but only half as much viral genome DNA was quantified in the liver compared to AAV9. TTM-002 demonstrated greatly reduced mRNA and viral genome DNA levels in the liver compared to AAV9. GFP immunohistochemical staining of the spleen, heart, skeletal muscle, kidneys, and lungs of mice injected with AAV particles encapsulated in the TTM-001 capsid variant or the TTM-002 capsid variant showed similar levels of payload expression as compared to those mice injected with AAV particles encapsulated in the wild-type AAV9 control capsid.

[1454] Taken together, these data demonstrate that TTM-001 and TTM-002 are enhanced CNS tropic capsids in mice that can infect non-neuronal cells. Additionally, these capsid variants were able to successfully penetrate the blood brain barrier following intravenous injection.

### Example 12. Maturation of TTM-001 and TTM-002 Capsid in NHPs

[1455] This Example describes maturation of the AAV9 capsid variants, TTM-001 (SEQ ID NO: 981 (amino acid) and 983 (DNA), comprising SEQ ID NO: 941) and TTM-002 (SEQ ID NO: 982 (amino acid) and 984 (DNA), comprising SEQ ID NO: 2) in NHPs to further enhance their transduction and biodistribution in the central nervous system as well as other tissues, and evolve the AAV capsid variants to provide further cross-species compatibility. Two approaches were used to mature the TTM-001 and TTM-002 capsid sequences in order to randomize and mutate within and around the peptide insert comprised within loop IV of the capsid variant. As many of the AAV capsid variants that demonstrated the greatest fold-enrichment in the NHP brain relative wild-type AAV9 comprised an SPH motif in the same position (e.g., immediately subsequent to position 455, relative to a reference sequence numbered according to the amino acid sequence of SEQ ID NO: 138) (see Example 10), the SPH motif was not mutated in either approach to mature the TTM-001 and TTM-002 capsid variants. In the first maturation approach, sets of three contiguous amino acids were randomized across the mutagenesis region in the TTM-001 and TTM-002 sequences, which spanned from position 450 to position 466, numbered according to SEQ ID NO: 981 and 982. In the second maturation approach, mutagenic primers were used to introduce point mutations at a low frequency, scattered across the mutagenesis region in the TTM-001 and TTM-002 sequences ranging from position 449 to position 466, numbered according to SEQ ID NO: 981 and 982. AAV capsid variants arising from each maturation approach for TTM-001 and TTM-002 were pooled together, for subsequent testing and characterization in NHPs.

[1456] The library of pooled matured AAV capsid variants generated using the first maturation approach and the second maturation approach for the TTM-001 and TTM-002 AAV capsid variants were injected into two NHPs. After a period in life, the brains, heart, liver, muscle, and DRG of the NHPs were isolated and RNA was extracted. Following RNA recovery and RT-PCR amplification, a systematic NGS enrichment analysis was performed to calculate the fold enrichment ratio relative to an AAV9 control, and the peptides comprised within the variants were identified.

[1457] Following the RNA recovery and NGS analysis from the second maturation approach, approximately 680,000 capsid variants were identified. The 680,000 matured capsid variants were then filtered based on samples with a raw virus count greater than 10 and a coefficient of variance (CV) of less than 1, which was calculated for each peptide across the brain samples taken from the two NHPs. Those that had a CV value<1 were identified, as these were the peptides that were reliably detected in the majority of samples isolated from the brains of the two NHPs. Using this filtering criteria, this led to approximately 64,000 matured capsid variants.

[1458] Table 15 provides the peptide sequences of the matured capsid variants having a raw virus count greater than 10, a CV of less than 1 for the brain samples isolated, and that also demonstrated a 50-fold or greater fold-increase in expression in the brain relative to the AAV9 control in both mice and NHPs. The matured variants in Table 15, were also those variants that had a fold-change in expression that was less than 2 relative to the AAV9 control in the liver and the DRG. Applying these criteria, approximately 350 matured capsid variants were identified that demonstrated high transduction in the brain in NHPs and mice, cross-species compatibility in mice and NHPs, and were de-targeted in the liver and DRG, relative to the AAV9 control. Several variants as shown in Table 15, led to greater than 100-fold increase in expression relative to AAV9 in the NHP and/or mouse brain, with one variant resulting in a greater than 200-fold increase in expression relative to AAV9 in both species.

[1459] Fold-change in expression for the TTM-001 and TTM-002 matured variants in Table 15 that showed increased expression in the brain of the NHPs and mice, were also calculated for the DRG, muscle, liver (RNA and DNA), and heart of the NHPs following each maturation approach. As shown in Table 15, many variants were de-targeted in the peripheral tissues with a lower fold-change in expression relative to the AAV9 control, demonstrating CNS-specific tropism and a preferential transduction of the brain and CNS. Some variants demonstrated increased expression to AAV9 in multiple tissues, including the brain and peripheral tissues, demonstrating pan-tropism.

TABLE 15
NGS fold-enrichment of TTM-001 and TTM-002 matured
AAV capsid variants in the brain of NHPs and mice

| | | Fold Enrichment relative to AAV9 | | | | | | |
|---|---|---|---|---|---|---|---|---|
| | SEQ | | | | | Liver | Liver | |
| | ID | Brain | DRG | Heart | Muscle | RNA | DNA | Brain |
| Sequence | NO: | (NHP) | (NHP) | (NHP) | (NHP) | (NHP) | (NHP) | (Mouse) |
| KTIIGSGSPHSKAQNRHT | 3239 | 217.176 | 0.000 | 0.000 | 0.000 | 0.000 | 0.000 | 210.515 |
| KTFPGSGSPHSKVQNQQT | 3240 | 199.720 | 0.000 | 0.000 | 0.000 | 0.000 | 0.967 | 97.703 |
| KTEKMSGSPHSKAQNQQT | 3241 | 169.461 | 0.523 | 0.000 | 0.000 | 0.000 | 0.158 | 109.161 |
| KEINGRGSPHSKAQNQQT | 3527 | 134.390 | 0.239 | 0.000 | 0.000 | 0.000 | 0.232 | 52.311 |
| KTVNRNGSPHSKAQNQQT | 3528 | 133.016 | 0.000 | 0.416 | 0.000 | 0.000 | 0.000 | 85.361 |
| KTVNGSGSPHSKARDQQT | 3242 | 124.789 | 0.123 | 0.039 | 0.312 | 0.569 | 0.454 | 132.137 |
| KTFNGSGSPHSKAPNLQT | 3243 | 121.436 | 0.000 | 0.167 | 0.000 | 0.000 | 0.015 | 168.920 |
| KTEKTSGSPHSKAQNQQT | 3244 | 120.337 | 0.000 | 0.355 | 0.000 | 0.000 | 0.119 | 101.467 |
| KTINGSGSPHSKAHVRQT | 3245 | 119.798 | 0.000 | 0.000 | 0.262 | 0.694 | 1.039 | 165.590 |
| KTVNGSGSPHSKAPNQHT | 3246 | 117.207 | 0.000 | 0.109 | 0.000 | 0.000 | 0.074 | 51.008 |
| KTEKISGSPHSKAQNQQT | 3247 | 116.603 | 0.000 | 0.000 | 0.000 | 0.000 | 0.426 | 102.978 |
| KTINGPGSPHSKAHNQQT | 3529 | 115.742 | 0.146 | 0.000 | 0.235 | 0.000 | 0.513 | 52.508 |
| KTVNGSGSPHSKTQSQQT | 3248 | 115.086 | 0.000 | 0.726 | 0.000 | 0.000 | 0.340 | 63.248 |
| TTINGSGSPHSKAQNQQT | 3249 | 114.856 | 1.340 | 14.856 | 0.827 | 1.281 | 0.957 | 72.058 |
| KSINESGSPHSKAQNQQI | 3250 | 113.833 | 0.000 | 0.000 | 0.000 | 0.000 | 0.000 | 67.649 |
| KTERTSGSPHSKAQNQQT | 3251 | 112.957 | 0.000 | 0.009 | 0.000 | 1.128 | 0.207 | 117.374 |
| KTINGSGSPHSKAQPAKT | 3252 | 111.472 | 0.331 | 0.000 | 1.089 | 0.044 | 1.796 | 215.275 |
| KTEKSSGSPHSKAQNQQT | 3253 | 107.470 | 0.000 | 0.016 | 0.014 | 0.977 | 0.179 | 100.177 |
| KTSYGNGSPHSKAQNQQT | 3530 | 105.937 | 0.000 | 0.000 | 0.000 | 0.000 | 0.114 | 105.894 |
| KTEKGSGSPHSKAQNQQT | 3254 | 105.614 | 0.053 | 0.031 | 0.000 | 0.586 | 0.169 | 84.653 |
| KTINGSGSPHSKSQTQQN | 3255 | 104.474 | 0.000 | 0.131 | 0.000 | 0.084 | 0.038 | 54.021 |
| KTERISGSPHSKAQNQQT | 3256 | 103.692 | 0.000 | 0.000 | 0.000 | 0.062 | 0.370 | 89.637 |
| KTERASGSPHSKAQNQQT | 3257 | 103.669 | 0.000 | 0.000 | 0.000 | 0.127 | 0.070 | 115.550 |
| KELHGSGSPHSKAQNQQT | 3258 | 102.680 | 0.000 | 0.000 | 0.000 | 1.634 | 0.592 | 96.554 |
| KAINGSGSPHSKAQNLAT | 3259 | 101.954 | 0.000 | 10.954 | 8.655 | 0.298 | 0.239 | 116.685 |
| KTVNGSGSPHSKSQNQLT | 3260 | 101.327 | 0.000 | 0.035 | 0.000 | 0.000 | 0.025 | 80.716 |
| KTERNSGSPHSKAQNQQT | 3261 | 99.892 | 0.000 | 0.000 | 0.000 | 0.000 | 0.107 | 87.392 |
| KSVNGNGSPHSKAQNQQT | 3531 | 99.385 | 0.000 | 1.329 | 0.000 | 0.359 | 0.079 | 51.016 |
| KTFNGSGSPHSKAQGQQT | 3262 | 99.253 | 0.000 | 0.208 | 0.000 | 0.128 | 0.099 | 81.459 |
| KTINGSGSPHGWVQNQQT | 3532 | 97.122 | 0.000 | 0.000 | 0.000 | 1.240 | 1.975 | 290.720 |
| KTERVSGSPHSKAQNQQT | 3263 | 96.943 | 0.000 | 0.000 | 0.000 | 0.000 | 0.144 | 135.438 |
| KTINGSGSPHSKALNRQS | 3264 | 96.843 | 0.136 | 0.532 | 0.000 | 0.042 | 0.178 | 55.945 |
| KTERLSGSPHSKAQNQQT | 3265 | 95.857 | 0.000 | 0.004 | 0.005 | 0.126 | 0.260 | 102.372 |
| KTDNGSGSPHSKAHNQQT | 3266 | 95.164 | 0.000 | 0.000 | 0.000 | 0.000 | 0.027 | 55.313 |
| KTFHGSGSPHSKTQNQQT | 3267 | 94.714 | 0.000 | 0.210 | 0.120 | 0.000 | 0.000 | 51.119 |
| KTINGGGSPHSKAQTQQI | 3533 | 92.345 | 0.000 | 0.000 | 0.000 | 0.000 | 0.023 | 54.199 |
| KTSNGSGSPHSKAQNPPT | 3268 | 91.528 | 0.000 | 0.000 | 0.000 | 0.000 | 0.039 | 51.541 |
| ETINGSGSPHSKAQNLQT | 3269 | 90.969 | 0.221 | 1.023 | 0.197 | 0.179 | 0.813 | 107.216 |
| KTVHGNGSPHSKAQNQQT | 3534 | 90.073 | 0.000 | 0.000 | 0.000 | 0.000 | 0.304 | 97.003 |
| NTINGSGSPHSKAQNQQT | 3270 | 90.017 | 1.712 | 1.261 | 1.171 | 0.923 | 0.540 | 55.179 |
| KTINGGGSPHSKAQNQQC | 3535 | 89.301 | 0.219 | 0.000 | 0.000 | 0.287 | 0.319 | 53.840 |
| KTENMSGSPHSKAQNQQT | 3271 | 89.247 | 0.000 | 0.000 | 0.000 | 0.000 | 0.260 | 130.568 |
| KTENVSGSPHSKAQNQQT | 3272 | 88.506 | 0.000 | 0.000 | 0.000 | 0.964 | 0.112 | 108.591 |
| KTSSGSGSPHSKAQYQQT | 3273 | 87.304 | 0.000 | 0.000 | 0.000 | 0.000 | 0.299 | 58.143 |
| KTIDGGGSPHSKAQNKQT | 3536 | 85.019 | 0.000 | 0.000 | 0.000 | 0.000 | 0.477 | 55.517 |
| KTEKVSGSPHSKAQNQQT | 3274 | 84.558 | 0.000 | 0.022 | 0.000 | 0.873 | 0.424 | 112.185 |
| KAINGSGSPHSKAQDQET | 3275 | 84.080 | 0.000 | 0.000 | 0.000 | 0.194 | 0.027 | 87.637 |
| KTCNKSGSPHSKAQNQQT | 3276 | 83.992 | 0.000 | 0.000 | 0.165 | 0.283 | 0.000 | 119.496 |
| KTINGGGSPHSKAQNQLI | 3537 | 83.881 | 0.000 | 0.000 | 0.000 | 0.046 | 0.387 | 78.383 |
| KNINGGGSPHSKAQNQQT | 3538 | 83.083 | 0.000 | 0.042 | 0.000 | 0.000 | 0.000 | 75.913 |
| KTEHLSGSPHSKAQNQQT | 3277 | 83.080 | 0.000 | 0.000 | 0.012 | 0.021 | 0.189 | 69.494 |
| KAEMGSGSPHSKAQNQQT | 3278 | 83.049 | 0.000 | 0.020 | 0.000 | 0.768 | 0.112 | 135.019 |
| KATNGSGSPHSKAQNHQT | 3279 | 82.627 | 0.000 | 0.176 | 0.000 | 0.155 | 0.057 | 66.207 |
| KAIKGSGSPHSKAQDQQT | 3280 | 82.258 | 0.000 | 0.000 | 0.000 | 0.108 | 0.000 | 85.178 |
| KTINGGGSPHSKSQNQLT | 3539 | 82.231 | 0.000 | 0.070 | 0.000 | 0.000 | 0.498 | 126.986 |
| KTVNGNGSPHSKAQNKQT | 3540 | 81.481 | 0.000 | 0.000 | 0.000 | 0.000 | 0.122 | 69.455 |
| KTINGSGSPHSKGHWQQT | 3281 | 81.434 | 0.000 | 0.000 | 0.000 | 0.000 | 1.011 | 65.252 |
| KTDKTSGSPHSKAQNQQT | 3282 | 81.430 | 0.000 | 0.000 | 0.000 | 1.362 | 0.291 | 169.515 |
| KTFKGSGSPHSKAPNQQT | 3283 | 80.890 | 0.000 | 0.000 | 0.000 | 0.000 | 0.017 | 71.144 |
| KTVNGSGSPHSKAQNQLI | 3284 | 80.509 | 0.000 | 0.000 | 0.000 | 0.000 | 0.166 | 71.156 |
| KTINGSGSPHSKRPEQQT | 3285 | 80.418 | 0.000 | 0.013 | 0.000 | 0.149 | 0.361 | 50.319 |
| KTINGSGSPHSKAQRTMT | 3286 | 80.388 | 0.000 | 0.022 | 0.170 | 1.812 | 1.025 | 100.248 |
| KTEKASGSPHSKAQNQQT | 3287 | 80.285 | 0.000 | 0.041 | 0.000 | 0.000 | 0.261 | 90.390 |
| KSDQGSGSPHSKAQNQQT | 3288 | 80.076 | 0.000 | 0.000 | 0.000 | 0.993 | 0.124 | 151.911 |
| KTEITSGSPHSKAQNQQT | 3289 | 79.620 | 0.000 | 0.163 | 0.000 | 0.332 | 0.074 | 76.686 |
| KTDKSSGSPHSKAQNQQT | 3290 | 79.470 | 0.055 | 0.012 | 0.000 | 1.437 | 0.367 | 141.351 |
| KTIDGSGSPHSKAQNQQH | 3291 | 79.090 | 0.000 | 0.000 | 0.000 | 0.136 | 0.049 | 57.914 |
| KTVNGNGSPHSKAQNQHT | 3541 | 78.849 | 0.000 | 0.000 | 0.000 | 0.000 | 0.045 | 54.086 |
| KNTNGSGSPHSKAQNQQT | 3292 | 78.445 | 0.000 | 0.000 | 0.000 | 0.571 | 0.177 | 89.719 |
| KTETHSGSPHSKAQNQQT | 3293 | 77.974 | 0.000 | 0.067 | 0.000 | 0.000 | 0.512 | 57.287 |
| KTINGGGSPHSKALNQQN | 3542 | 77.822 | 0.000 | 0.131 | 0.000 | 0.000 | 0.274 | 69.884 |
| KTINGSGSPHSKALHQHT | 3294 | 77.502 | 0.000 | 0.052 | 0.041 | 0.000 | 0.188 | 68.196 |
| KTINGTGSPHSKAQNHQI | 3543 | 77.089 | 0.171 | 0.000 | 0.000 | 0.000 | 0.166 | 54.281 |
| KTINGSGSPHSKAQHRIT | 3295 | 76.849 | 0.105 | 0.499 | 0.170 | 1.424 | 0.214 | 127.000 |
| KTINGSGSPHSKAQYIHT | 3296 | 76.170 | 0.000 | 0.014 | 0.033 | 1.523 | 0.168 | 59.649 |
| KTENISGSPHSKAQNQQT | 3297 | 76.072 | 0.000 | 0.000 | 0.000 | 0.115 | 0.132 | 83.118 |
| KTIIGGGSPHSKAHNQQT | 3544 | 75.872 | 0.000 | 0.050 | 0.000 | 0.000 | 0.235 | 65.492 |
| KTINGSGSPHSKAQKFET | 3298 | 75.788 | 0.000 | 0.000 | 0.028 | 0.108 | 0.093 | 65.588 |
| KTSNESGSPHSKAQNHQT | 3299 | 75.720 | 0.000 | 0.000 | 0.000 | 0.169 | 0.217 | 70.590 |
| KTINGSGSPHSKAQFPST | 3300 | 75.677 | 0.000 | 0.004 | 0.000 | 0.849 | 0.127 | 119.712 |
| KTERPSGSPHSKAQNQQT | 3301 | 75.669 | 0.000 | 0.029 | 0.000 | 0.000 | 0.156 | 73.894 |
| KTINGNGSPHSKAQNPLT | 3545 | 75.269 | 0.000 | 0.000 | 0.000 | 0.366 | 0.000 | 53.583 |
| KSIKGNGSPHSKAQNQQT | 3546 | 75.196 | 0.000 | 0.000 | 0.000 | 0.000 | 0.000 | 90.251 |
| KTERMSGSPHSKAQNQQT | 3302 | 74.910 | 0.000 | 0.000 | 0.000 | 0.100 | 0.151 | 122.812 |
| KTERSSGSPHSKAQNQQT | 3303 | 74.853 | 0.000 | 0.071 | 0.000 | 1.036 | 0.056 | 125.538 |
| KTELHSGSPHSKAQNQQT | 3304 | 74.620 | 0.000 | 0.000 | 0.000 | 0.021 | 0.089 | 53.124 |
| KTELTSGSPHSKAQNQQT | 3305 | 74.548 | 0.000 | 0.000 | 0.000 | 0.537 | 0.421 | 100.311 |
| KTINGSGSPHSKAHNQQR | 3306 | 74.272 | 0.562 | 0.486 | 0.047 | 0.956 | 0.057 | 107.301 |
| KTINGGGSPHSKAQSQQI | 3547 | 74.264 | 0.000 | 0.000 | 0.000 | 0.000 | 0.235 | 67.651 |
| KTINGSGSPHSKAQAIKT | 3307 | 74.261 | 0.255 | 0.000 | 0.000 | 0.186 | 0.132 | 73.560 |
| KTENTSGSPHSKAQNQQT | 3308 | 74.061 | 0.000 | 0.000 | 0.218 | 0.233 | 0.730 | 96.249 |
| KTIDGSGSPHSKGQNRQT | 3309 | 73.930 | 0.000 | 0.000 | 0.000 | 0.106 | 0.091 | 63.626 |
| KNINGSGSPHSKAQSQQT | 3310 | 73.757 | 0.000 | 0.000 | 0.000 | 0.000 | 0.041 | 57.432 |
| KTINGSVSPHGKAQNQLT | 3548 | 73.525 | 0.000 | 0.061 | 0.067 | 0.000 | 0.053 | 51.358 |
| KTSNASGSPHSKAQNQLT | 3311 | 73.501 | 0.000 | 0.000 | 0.297 | 0.000 | 0.313 | 150.401 |
| KTEARSGSPHSKAQNQQT | 3312 | 73.349 | 0.000 | 0.000 | 0.000 | 0.695 | 0.118 | 62.903 |
| KTEKNSGSPHSKAQNQQT | 3313 | 73.347 | 0.000 | 0.000 | 0.044 | 0.159 | 0.021 | 74.393 |
| KTANGSGSPHSKAQYQQT | 3314 | 73.038 | 0.000 | 0.000 | 0.000 | 0.153 | 0.160 | 139.451 |
| KTVNGSGSPHSKAQYQHT | 3315 | 72.847 | 0.000 | 0.000 | 0.000 | 0.000 | 0.130 | 54.158 |
| KTINGSGSPHTKAQNPQS | 3316 | 72.594 | 0.000 | 0.000 | 0.000 | 0.000 | 0.130 | 62.508 |
| KTINGSGSPHSKGQNPPT | 3317 | 72.339 | 0.000 | 0.206 | 0.000 | 0.000 | 0.041 | 134.808 |
| KTIIGSGSPHSKAQHQLT | 3318 | 72.291 | 0.000 | 0.000 | 0.000 | 0.000 | 0.000 | 100.144 |
| KTINGSGSPHSKAQSPPT | 3319 | 71.632 | 0.069 | 0.047 | 0.274 | 0.179 | 0.425 | 97.111 |
| NTIYGSGSPHSKAQNQQT | 3320 | 71.267 | 1.739 | 0.000 | 273.69 | 0.000 | 0.209 | 59.707 |
| KTINGSGSPHSKAQAKLT | 3321 | 71.154 | 0.000 | 0.273 | 0.017 | 1.591 | 0.777 | 130.132 |
| KTDKNSGSPHSKAQNQQT | 3322 | 70.964 | 0.000 | 0.000 | 0.000 | 0.070 | 0.123 | 62.932 |
| KTINGSGSPHSKTKSQQT | 3323 | 70.891 | 0.000 | 0.568 | 0.045 | 0.418 | 0.496 | 83.923 |
| KTINGSGSPHSKAQDRPT | 3324 | 70.831 | 0.132 | 0.006 | 0.000 | 0.039 | 0.379 | 66.800 |
| KTINGIGSPHSKAQNLGT | 3549 | 70.543 | 0.000 | 0.071 | 0.000 | 0.000 | 0.135 | 104.769 |
| KTINGSGSPHSKAQSQQL | 3325 | 70.539 | 0.000 | 0.000 | 0.000 | 0.000 | 0.041 | 51.126 |
| KTENLSGSPHSKAQNQQT | 3326 | 70.303 | 0.070 | 0.000 | 0.000 | 0.395 | 0.470 | 107.385 |
| KTINGSGSPHSKAQAFHT | 3327 | 70.159 | 0.033 | 0.000 | 0.058 | 0.762 | 0.119 | 86.268 |
| KTINGSGSPHSKAQKQQD | 3328 | 70.116 | 0.000 | 0.024 | 0.000 | 0.064 | 0.083 | 110.196 |
| KTFSGSGSPHSKAQNLQT | 3329 | 70.035 | 0.000 | 0.327 | 0.303 | 0.000 | 0.228 | 70.917 |
| KAINGSGSPHSKAQNAQT | 3330 | 69.651 | 0.000 | 0.000 | 0.000 | 0.023 | 0.142 | 72.160 |
| KTESWSGSPHSKAQNQQT | 3331 | 69.144 | 0.000 | 0.000 | 0.000 | 0.000 | 0.019 | 67.699 |
| KTTNGSGSPHSKAHNQLT | 3332 | 69.062 | 0.000 | 0.000 | 0.000 | 0.708 | 0.000 | 65.505 |
| KTVNGNGSPHSKAQNHQT | 3550 | 68.889 | 0.000 | 0.000 | 0.000 | 0.000 | 0.030 | 52.482 |
| KTEDKSGSPHSKAQNQQT | 3333 | 68.813 | 0.000 | 0.000 | 0.000 | 0.000 | 0.000 | 70.071 |
| KTESASGSPHSKAQNQQT | 3334 | 68.651 | 0.000 | 0.000 | 0.000 | 0.274 | 0.084 | 80.500 |
| KTNNGSGSPHSKAQNQQY | 3335 | 68.530 | 0.000 | 0.040 | 0.000 | 0.000 | 0.059 | 82.656 |
| KTSNGGGSPHSKAQNLQT | 3551 | 68.311 | 0.000 | 0.052 | 0.000 | 0.000 | 0.000 | 124.871 |
| KTDKMSGSPHSKAQNQQT | 3336 | 68.167 | 0.000 | 0.000 | 0.000 | 0.017 | 0.205 | 88.234 |
| KEVHGSGSPHSKAQNQQT | 3337 | 67.901 | 0.000 | 0.000 | 0.000 | 0.727 | 0.000 | 100.111 |
| KTINGSGSPHSKAQKLNT | 3338 | 67.782 | 0.073 | 0.092 | 0.000 | 1.232 | 0.201 | 68.637 |
| KTINGGGSPHSKSQNQHT | 3552 | 67.773 | 0.000 | 0.057 | 0.000 | 0.000 | 0.220 | 100.748 |
| KTVNGGGSPHSKAQSQQT | 3553 | 67.634 | 0.000 | 0.055 | 0.000 | 0.000 | 0.210 | 160.711 |
| KTTNGSGSPHSKAQYQHT | 3339 | 67.325 | 0.000 | 0.000 | 0.000 | 1.378 | 0.080 | 83.337 |
| KTISGSGSPHSKAQYQHT | 3340 | 66.739 | 0.000 | 0.000 | 0.000 | 0.000 | 0.191 | 59.822 |
| KTESTSGSPHSKAQNQQT | 3341 | 66.649 | 0.000 | 0.009 | 0.000 | 1.688 | 0.176 | 95.861 |
| KTINGSGSPHSKSQNVQT | 3342 | 66.627 | 0.000 | 0.190 | 0.000 | 0.202 | 0.188 | 56.672 |
| KSINGSGSPHSKAQAQQT | 3343 | 66.464 | 0.000 | 0.711 | 0.000 | 0.148 | 0.111 | 78.451 |
| KTVNGSGSPHSKAQNLQA | 3344 | 66.379 | 0.000 | 0.000 | 0.000 | 0.000 | 0.132 | 50.934 |
| KTVRDSGSPHSKAQNQQT | 3345 | 66.056 | 0.000 | 0.025 | 0.000 | 0.129 | 0.461 | 142.600 |
| KTFNASGSPHSKAPNQQT | 3346 | 65.392 | 0.208 | 0.000 | 0.000 | 0.215 | 0.156 | 66.275 |
| KTDRMSGSPHSKAQNQQT | 3347 | 65.143 | 0.000 | 0.000 | 0.000 | 0.332 | 0.103 | 104.890 |
| KTINGSGSPHSKAQTPPT | 3348 | 64.657 | 0.010 | 0.015 | 0.014 | 0.200 | 0.207 | 54.179 |
| ETIKGSGSPHSKAQNQQT | 3349 | 64.609 | 0.000 | 0.000 | 0.144 | 0.000 | 0.024 | 67.201 |
| KNHIGSGSPHSKAQNQQT | 3350 | 64.535 | 0.000 | 0.000 | 0.000 | 1.253 | 0.187 | 70.356 |
| KTINGSGSPHSKAQYQHA | 3351 | 64.435 | 0.000 | 0.000 | 0.024 | 0.993 | 0.097 | 57.278 |
| KTIPIDGSPHSKAQNQQT | 3554 | 64.421 | 0.000 | 0.047 | 0.000 | 0.234 | 0.936 | 76.826 |
| KTINGSGSPHSKAQGQQA | 3352 | 64.128 | 0.000 | 0.185 | 0.000 | 0.063 | 0.195 | 64.116 |
| KTFNGSGSPHNKAQNHQT | 3353 | 64.060 | 0.000 | 0.000 | 0.035 | 0.094 | 0.317 | 67.757 |
| KESDGSGSPHSKAQNQQT | 3354 | 63.766 | 0.000 | 0.000 | 0.000 | 0.567 | 0.146 | 115.231 |
| KTINGSGSPHSKAQPPAT | 3355 | 63.510 | 0.048 | 0.030 | 0.031 | 0.126 | 0.302 | 117.453 |
| KTINGSGSPHSKAQERPT | 3356 | 63.460 | 0.000 | 0.011 | 0.000 | 0.810 | 0.173 | 57.506 |
| KTIKGSGSPHSKAQDLQT | 3357 | 63.260 | 0.000 | 0.000 | 0.000 | 0.000 | 0.218 | 58.576 |
| KTDLKSGSPHSKAQNQQT | 3358 | 63.152 | 0.000 | 0.000 | 0.012 | 0.285 | 0.377 | 62.687 |
| KTINGGGSPHSKAQNPPT | 3555 | 63.041 | 0.000 | 0.082 | 0.000 | 0.000 | 0.057 | 64.045 |
| KTINGSGSPHSKAQAMHT | 3359 | 62.756 | 0.000 | 0.000 | 0.010 | 0.976 | 0.393 | 84.056 |
| KTVPNSGSPHSKAQNQQT | 3360 | 62.540 | 0.000 | 0.000 | 0.011 | 0.202 | 0.161 | 93.793 |
| KTVIGSGSPHSKALNQQT | 3361 | 62.358 | 0.000 | 0.310 | 0.000 | 0.062 | 0.245 | 60.369 |
| KTINGSGSPHSKAQHPST | 3362 | 62.255 | 0.000 | 0.044 | 0.000 | 1.345 | 0.301 | 101.103 |
| KTINGLGSPHSKSQNQQT | 3556 | 62.170 | 0.000 | 0.157 | 0.000 | 0.146 | 0.107 | 64.139 |
| KTINGTGSPHSKAQNQQM | 3557 | 62.151 | 0.000 | 0.000 | 0.000 | 0.000 | 0.000 | 62.376 |
| KTINGSGSPHSKAPGLQT | 3363 | 62.043 | 0.007 | 0.000 | 0.005 | 0.651 | 0.210 | 144.610 |
| KTINGSGSPHSKAQGIRT | 3364 | 61.952 | 0.041 | 0.000 | 0.012 | 0.897 | 0.502 | 155.013 |
| KTESHSGSPHSKAQNQQT | 3365 | 61.947 | 0.000 | 0.000 | 0.000 | 1.480 | 0.106 | 52.506 |
| KTINGSGSPHSKAQAPAT | 3366 | 61.934 | 0.000 | 0.169 | 0.015 | 0.696 | 0.197 | 127.420 |
| KTINGSGSPHSKSQSQQI | 3367 | 61.870 | 0.000 | 0.000 | 0.000 | 0.200 | 0.175 | 64.027 |
| KAEHGSGSPHSKAQNQQT | 3368 | 61.830 | 0.000 | 0.000 | 0.000 | 0.772 | 0.184 | 116.201 |
| KTEDRSGSPHSKAQNQQT | 3369 | 61.756 | 0.000 | 0.000 | 0.000 | 1.004 | 0.408 | 66.887 |
| KNCLGSGSPHSKAQNQQT | 3370 | 61.442 | 0.000 | 0.036 | 0.000 | 1.849 | 0.026 | 82.488 |
| KTDRGSGSPHSKAQNQQT | 3371 | 61.419 | 0.000 | 0.004 | 0.000 | 0.211 | 0.316 | 74.256 |
| KTINGSGSPHSKAQIPPT | 3372 | 61.258 | 0.000 | 0.000 | 0.000 | 0.758 | 0.115 | 87.661 |
| KTVKGSGSPHSKAQDQQT | 3373 | 61.175 | 0.000 | 0.041 | 0.000 | 0.432 | 0.090 | 58.114 |
| KNADGSGSPHSKAQNQQT | 3374 | 60.944 | 0.000 | 0.000 | 0.000 | 1.239 | 0.085 | 104.503 |
| KTDKVSGSPHSKAQNQQT | 3375 | 60.935 | 0.000 | 0.015 | 0.000 | 0.765 | 0.128 | 146.657 |
| KTITGSGSPHSKAQTQLT | 3376 | 60.846 | 0.160 | 8.992 | 0.000 | 0.000 | 0.000 | 55.640 |
| KTINGSGSPHSKAQAPST | 3377 | 60.696 | 0.200 | 0.005 | 0.000 | 0.751 | 0.263 | 115.528 |
| KNCVGSGSPHSKAQNQQT | 3378 | 60.535 | 0.000 | 0.000 | 0.000 | 0.018 | 0.282 | 96.175 |
| KTIRDAGSPHSKAQNQQT | 3558 | 60.346 | 0.000 | 0.000 | 0.000 | 0.141 | 0.251 | 113.179 |
| KTVKDSGSPHSKAQNQQT | 3379 | 60.216 | 0.000 | 0.019 | 0.000 | 0.443 | 0.251 | 87.334 |
| KNALGSGSPHSKAQNQQT | 3380 | 60.014 | 0.000 | 0.003 | 0.000 | 0.682 | 0.213 | 137.222 |
| KVINGSGSPHSKGQNQQT | 3381 | 60.001 | 0.000 | 0.000 | 0.031 | 0.264 | 0.157 | 68.532 |
| KTVNGGGSPHSKAQNQQS | 3559 | 59.871 | 0.062 | 0.020 | 0.000 | 0.080 | 0.185 | 61.847 |
| KTIQDGGSPHSKAQNQQT | 3560 | 59.865 | 0.000 | 0.000 | 0.116 | 1.435 | 0.789 | 87.522 |
| KTISGGGSPHSKAQNQQN | 3561 | 59.801 | 0.000 | 0.000 | 0.000 | 0.722 | 0.039 | 87.761 |
| KTSNASGSPHSKAHNQQT | 3382 | 59.607 | 0.000 | 0.078 | 0.067 | 0.031 | 0.050 | 67.967 |
| KTINGSGSPHSKAQNTYA | 3383 | 59.603 | 0.000 | 0.000 | 0.000 | 0.425 | 0.346 | 101.715 |
| KTINGSGSPHSKSQNQHI | 3384 | 59.438 | 0.000 | 0.099 | 0.000 | 0.111 | 0.108 | 76.025 |
| KTINGGGSPHSKAQDKQT | 3562 | 59.322 | 0.000 | 0.000 | 0.000 | 0.000 | 0.093 | 50.764 |
| KTEFVSGSPHSKAQNQQT | 3385 | 59.306 | 0.000 | 0.000 | 0.000 | 0.196 | 0.276 | 69.788 |
| KTVNGSGSPHSKAQNHLT | 3386 | 59.239 | 0.133 | 0.034 | 0.000 | 0.000 | 0.156 | 70.786 |
| KTREISGSPHSKAQNQQT | 3387 | 59.027 | 0.000 | 0.042 | 0.224 | 0.356 | 0.269 | 51.696 |
| KTINGSGSPHSKAQIGMT | 3388 | 59.013 | 0.081 | 106.528 | 0.000 | 1.003 | 0.248 | 134.585 |
| KTIDGSGSPHSKALNKQT | 3389 | 58.992 | 0.000 | 0.26 | 0.000 | 0.000 | 0.056 | 74.626 |
| KTIIGGGSPHSKAQNPQT | 3563 | 58.924 | 0.000 | 0.202 | 0.000 | 0.000 | 0.126 | 53.992 |
| KQGEGSGSPHSKAQNQQT | 3390 | 58.752 | 0.000 | 0.000 | 0.000 | 0.000 | 0.151 | 135.300 |
| KTINGTGSPHSKAPNQLT | 3564 | 58.738 | 0.000 | 0.000 | 0.000 | 0.229 | 0.035 | 86.939 |
| KTVNGSGSPHSKAQLQQT | 3391 | 58.681 | 0.315 | 0.465 | 0.045 | 0.529 | 0.333 | 81.201 |
| KTFNGGGSPHSKAQYQQT | 3565 | 58.609 | 0.000 | 0.000 | 0.000 | 0.163 | 0.045 | 72.618 |
| KSINGSGSPHSKTQSQQT | 3392 | 58.608 | 0.000 | 3.017 | 0.000 | 0.155 | 0.017 | 71.397 |
| KTVNGGGSPHSKAQHQQT | 3566 | 58.602 | 0.729 | 0.000 | 0.000 | 0.000 | 0.043 | 138.544 |
| KSEKGSGSPHSKAQNQQT | 3393 | 58.566 | 0.000 | 0.010 | 0.011 | 1.601 | 0.059 | 158.931 |
| KNVNGSGSPHSKAQNQQT | 3394 | 58.481 | 0.000 | 0.000 | 0.000 | 0.917 | 0.166 | 53.379 |
| KGGEGSGSPHSKAQNQQT | 3395 | 58.472 | 0.000 | 0.034 | 0.000 | 0.037 | 0.066 | 91.023 |
| KTINGSGSPHSKAQRMST | 3396 | 58.435 | 0.192 | 0.037 | 0.000 | 1.707 | 0.882 | 53.414 |
| KTINGSGSPHSKAQGILT | 3397 | 58.418 | 0.000 | 0.005 | 0.010 | 0.569 | 0.192 | 102.631 |
| KEFVGSGSPHSKAQNQQT | 3398 | 58.374 | 0.000 | 0.046 | 0.000 | 0.088 | 0.326 | 128.675 |
| KTIIGSGSPHSKAQDRQT | 3399 | 58.258 | 1.393 | 0.230 | 0.219 | 0.000 | 0.045 | 53.981 |
| KSDKGSGSPHSKAQNQQT | 3400 | 58.248 | 0.000 | 0.000 | 0.000 | 0.076 | 0.166 | 146.566 |
| KTEQVSGSPHSKAQNQQT | 3401 | 58.247 | 0.000 | 0.000 | 0.000 | 0.000 | 0.081 | 88.487 |
| KTEHVSGSPHSKAQNQQT | 3402 | 58.228 | 0.000 | 0.024 | 0.000 | 0.433 | 0.141 | 71.410 |
| KTINGSGSPHSKARDWQT | 3403 | 58.216 | 0.000 | 0.005 | 0.000 | 0.800 | 0.259 | 120.704 |
| KTENASGSPHSKAQNQQT | 3404 | 58.187 | 0.000 | 0.038 | 0.000 | 0.371 | 0.129 | 88.439 |
| KEVQGSGSPHSKAQNQQT | 3405 | 58.125 | 0.000 | 0.000 | 0.000 | 0.657 | 0.000 | 168.220 |
| KTINGSGSPHSKAQNTHD | 3406 | 58.108 | 0.000 | 0.027 | 0.000 | 0.410 | 0.126 | 81.189 |
| KTINGSGSPHSKAPNLQI | 3407 | 58.022 | 0.000 | 0.044 | 0.000 | 1.548 | 0.243 | 55.714 |
| KTINGSGSPHSKAQERST | 3408 | 58.021 | 0.000 | 0.011 | 0.005 | 0.829 | 0.409 | 87.656 |
| KTSNGSGSPHSKAQNYQT | 3409 | 57.894 | 0.000 | 0.082 | 0.000 | 0.000 | 0.110 | 63.681 |
| KTEYISGSPHSKAQNQQT | 3410 | 57.891 | 0.000 | 0.000 | 0.000 | 0.076 | 0.075 | 57.620 |
| KTINGSGSPHSKAQRTCT | 3411 | 57.863 | 0.000 | 0.140 | 0.129 | 1.855 | 1.716 | 90.146 |
| KTINGSGSPHSKAQIGHT | 3412 | 57.769 | 0.024 | 0.000 | 0.000 | 0.281 | 0.154 | 99.262 |
| KNCWGSGSPHSKAQNQQT | 3413 | 57.756 | 0.000 | 0.000 | 0.000 | 0.000 | 0.092 | 59.888 |
| KTINGSGSPHSKAQGAIT | 3414 | 57.627 | 0.000 | 0.000 | 0.000 | 0.594 | 0.161 | 95.696 |
| KTDVNSGSPHSKAQNQQT | 3415 | 57.593 | 0.000 | 0.000 | 0.000 | 0.000 | 0.331 | 66.127 |
| KSDIGSGSPHSKAQNQQT | 3416 | 57.592 | 0.000 | 0.000 | 0.000 | 0.844 | 0.128 | 107.342 |
| KTINGSGSPHSKAQVPPT | 3417 | 57.316 | 0.000 | 0.012 | 0.000 | 0.257 | 0.200 | 90.220 |
| KTINGSGSPHSKAQVQQI | 3418 | 57.308 | 0.000 | 1.113 | 0.000 | 0.000 | 0.113 | 61.957 |
| KTINGSGSPHSKALMRQT | 3419 | 57.234 | 0.060 | 0.036 | 0.100 | 1.798 | 0.517 | 81.332 |
| KTINGSGSPHSKAQYSVT | 3420 | 57.130 | 0.000 | 0.093 | 0.000 | 1.235 | 0.302 | 60.023 |
| KNSIGSGSPHSKAQNQQT | 3421 | 57.101 | 0.000 | 0.052 | 0.000 | 0.083 | 0.074 | 97.381 |
| KTINGSGSPHSKVPNLQT | 3422 | 57.046 | 0.000 | 0.029 | 0.000 | 0.459 | 0.082 | 50.474 |
| KAINGSGSPHSKAQSQQI | 3423 | 56.976 | 0.000 | 0.000 | 0.000 | 0.000 | 0.000 | 57.052 |
| KTINGSGSPHSKAQAITT | 3424 | 56.924 | 0.000 | 0.000 | 0.000 | 1.239 | 0.438 | 75.250 |
| KTINGSGSPHSKAQKTLT | 3425 | 56.844 | 0.000 | 0.017 | 0.009 | 1.800 | 1.400 | 66.415 |
| KTVNGSGSPHSKAQNQWT | 3426 | 56.823 | 0.000 | 0.000 | 0.299 | 0.000 | 0.219 | 69.906 |
| KTINGSGSPHSKAQLHHT | 3427 | 56.815 | 0.025 | 0.000 | 0.010 | 0.712 | 0.368 | 58.418 |
| KTEQTSGSPHSKAQNQQT | 3428 | 56.683 | 0.000 | 0.045 | 0.000 | 0.792 | 0.430 | 59.360 |
| KTINGSGSPHSKAQNIII | 3429 | 56.630 | 0.000 | 0.062 | 0.123 | 0.099 | 0.056 | 76.742 |
| KNSLGSGSPHSKAQNQQT | 3430 | 56.621 | 0.000 | 0.028 | 0.000 | 0.308 | 0.162 | 101.942 |
| KTIPMEGSPHSKAQNQQT | 3567 | 56.560 | 0.000 | 0.000 | 0.000 | 1.824 | 0.371 | 89.951 |
| KTINGSGSPHSKAQGHHT | 3431 | 56.559 | 0.000 | 0.000 | 0.000 | 0.632 | 0.117 | 71.050 |
| KTDRTSGSPHSKAQNQQT | 3432 | 56.466 | 0.000 | 0.000 | 0.000 | 0.062 | 0.160 | 148.498 |
| KTINGSGSPHSKAQSKVT | 3433 | 56.373 | 0.000 | 0.050 | 0.014 | 1.021 | 0.390 | 76.115 |
| KEVVGSGSPHSKAQNQQT | 3434 | 56.371 | 0.000 | 0.000 | 0.000 | 0.000 | 0.323 | 116.964 |
| KTINGSGSPHSKAQLPST | 3435 | 56.238 | 0.005 | 4.258 | 0.001 | 1.040 | 0.185 | 84.918 |
| KTINGSGSPHSKAIGKQT | 3436 | 56.158 | 0.000 | 0.000 | 0.000 | 0.887 | 0.088 | 110.132 |
| KTEPTSGSPHSKAQNQQT | 3437 | 56.134 | 0.000 | 0.000 | 0.000 | 0.06 | 0.527 | 143.397 |
| KTVNGGGSPHSKSQNQQT | 3568 | 56.114 | 0.116 | 0.000 | 0.000 | 0.000 | 0.040 | 170.548 |
| KTINGSGSPHSKAQAIHT | 3438 | 56.047 | 0.000 | 0.000 | 212.32 | 0.887 | 0.890 | 81.908 |
| KTINGSGSPHSKAQHGLT | 3439 | 55.999 | 0.000 | 0.000 | 0.101 | 1.913 | 0.244 | 117.191 |
| KSELGSGSPHSKAQNQQT | 3440 | 55.997 | 0.000 | 0.005 | 0.000 | 0.881 | 0.239 | 120.521 |
| KTINGSGSPHSKAQFMCT | 3441 | 55.916 | 0.000 | 0.000 | 0.000 | 0.078 | 0.448 | 81.959 |
| KTINVSGSPHSKAQGQQT | 3442 | 55.870 | 0.000 | 0.191 | 0.000 | 0.592 | 0.040 | 87.211 |
| KTINGGGSPHSKAQNQMT | 3569 | 55.778 | 0.000 | 0.000 | 0.000 | 0.866 | 0.012 | 73.177 |
| KTVNGSGSPHSKAQHLQT | 3443 | 55.739 | 0.091 | 0.036 | 0.000 | 0.062 | 0.409 | 62.743 |
| KTIRENGSPHSKAQNQQT | 3570 | 55.605 | 0.000 | 0.000 | 0.016 | 0.131 | 0.257 | 95.931 |
| KTINGSGSPHSKTQNHQN | 3444 | 55.551 | 0.000 | 0.048 | 0.000 | 0.000 | 0.099 | 64.846 |
| KTINGSGSPHSKAQPART | 3445 | 55.513 | 0.000 | 0.000 | 0.328 | 1.294 | 0.991 | 127.301 |
| KTVNGSGSPHSKAQSLQT | 3446 | 55.497 | 0.000 | 0.060 | 0.000 | 0.000 | 0.143 | 69.033 |
| KTINGSGSPHSKSQSQLT | 3447 | 55.430 | 0.000 | 0.035 | 0.000 | 0.050 | 0.013 | 125.577 |
| KTINGSASPHSKAHSQQT | 3571 | 55.293 | 0.000 | 0.000 | 0.000 | 0.000 | 0.166 | 66.252 |
| KTWQNSGSPHSKAQNQQT | 3448 | 55.245 | 0.000 | 0.000 | 0.000 | 0.111 | 0.265 | 114.258 |
| KTINGSGSPHSKAQDRQS | 3449 | 55.137 | 1.146 | 0.016 | 0.106 | 0.644 | 0.086 | 55.701 |
| KTINGSGSPHSKAQMPST | 3450 | 54.986 | 1.691 | 0.039 | 0.028 | 0.450 | 0.202 | 114.331 |
| KTNNGGGSPHSKAQNLQT | 3572 | 54.963 | 0.000 | 0.000 | 0.000 | 0.000 | 0.089 | 80.506 |
| KTINGSGSPHSKAQGSLT | 3451 | 54.717 | 0.000 | 0.006 | 0.013 | 0.480 | 0.298 | 142.786 |
| KTEVTSGSPHSKAQNQQT | 3452 | 54.663 | 0.000 | 0.000 | 0.000 | 0.323 | 0.185 | 81.482 |
| KSINGGGSPHSKAQYQQT | 3573 | 54.612 | 0.000 | 0.000 | 0.000 | 0.105 | 0.010 | 65.952 |
| KTVIGSGSPHSKSQNQQT | 3453 | 54.603 | 0.000 | 0.000 | 0.000 | 0.000 | 0.106 | 69.121 |
| KAVNVSGSPHSKAQNQQT | 3454 | 54.586 | 0.000 | 0.000 | 0.000 | 0.000 | 0.023 | 57.835 |
| KTVNGNGSPHSKSQNQQT | 3574 | 54.586 | 0.000 | 0.000 | 0.000 | 0.256 | 0.168 | 95.384 |
| KTDRNSGSPHSKAQNQQT | 3455 | 54.495 | 0.000 | 0.000 | 0.000 | 0.823 | 0.241 | 85.823 |
| KTINGSGSPHSKAQVPAT | 3456 | 54.475 | 0.000 | 0.002 | 0.000 | 0.782 | 0.223 | 137.743 |
| KGVLGSGSPHSKAQNQQT | 3457 | 54.472 | 0.000 | 0.007 | 0.027 | 0.359 | 0.189 | 145.740 |
| KTLNGNGSPHSKAQNLQT | 3575 | 54.458 | 0.668 | 0.000 | 0.000 | 0.161 | 0.172 | 159.134 |
| KAINGSGSPHSKAQDKQT | 3458 | 54.452 | 0.000 | 0.000 | 0.057 | 0.044 | 0.223 | 56.004 |
| KTSNGSGSPHSKAHYQQT | 3459 | 54.414 | 0.000 | 0.251 | 0.000 | 0.249 | 0.204 | 54.162 |
| KTINGSGSPHSKAQVPST | 3460 | 54.366 | 0.000 | 1.001 | 0.000 | 0.202 | 0.139 | 117.223 |
| KTINGSGSSHSKAQNQQT | 3576 | 54.292 | 1.709 | 1.870 | 1.287 | 1.075 | 0.458 | 67.731 |
| KTELRSGSPHSKAQNQQT | 3461 | 54.289 | 0.000 | 0.007 | 0.040 | 0.790 | 0.239 | 57.814 |
| KNINGSGSPHSKAQNHQT | 3462 | 54.248 | 0.000 | 0.034 | 0.000 | 0.340 | 0.075 | 74.979 |
| KTVNGGGSPHSKAQNHQT | 3577 | 54.246 | 0.375 | 0.024 | 0.000 | 0.000 | 0.146 | 67.188 |
| KTINGSGSPHSKARGEQT | 3463 | 54.207 | 0.025 | 0.006 | 0.005 | 0.309 | 0.327 | 128.098 |
| KTINGGGSPHSKAQYQHT | 3578 | 54.188 | 0.000 | 0.000 | 0.000 | 0.000 | 0.223 | 82.256 |
| KTEDLSGSPHSKAQNQQT | 3464 | 54.156 | 0.000 | 0.000 | 0.000 | 1.193 | 0.132 | 70.198 |
| KTINGSGSPHSKAPGQQT | 3465 | 54.071 | 0.065 | 0.000 | 0.004 | 0.542 | 0.179 | 73.440 |
| KTIPKNGSPHSKAQNQQT | 3579 | 53.824 | 0.000 | 0.032 | 0.000 | 0.115 | 0.178 | 77.458 |
| KTINGSGSPHSKAQSLQI | 3466 | 53.778 | 0.000 | 0.186 | 0.000 | 0.022 | 0.047 | 51.543 |
| KTINGSGSPHSKRLEQQT | 3467 | 53.512 | 0.000 | 0.118 | 0.003 | 0.161 | 0.292 | 71.704 |
| KTERGSGSPHSKAQNQQT | 3468 | 53.475 | 0.000 | 0.030 | 0.000 | 1.416 | 0.175 | 85.368 |
| KTVNGSGSPHSKAPNQQT | 3469 | 53.444 | 0.833 | 2.206 | 0.006 | 0.156 | 0.178 | 58.080 |
| KTSNGSGSPHSKAQNQST | 3470 | 53.353 | 0.000 | 0.000 | 0.000 | 0.000 | 0.014 | 120.897 |
| KTINGSGSPHSKAQKVIT | 3471 | 53.273 | 0.000 | 0.000 | 0.000 | 0.357 | 0.402 | 95.147 |
| KTEGISGSPHSKAQNQQT | 3472 | 53.270 | 0.000 | 0.000 | 0.000 | 0.000 | 0.010 | 78.303 |
| KTINGSGSPHSKAQNNDQ | 3473 | 53.226 | 0.000 | 0.000 | 0.000 | 0.593 | 0.046 | 59.664 |
| KTINGSGSPHSKAQSVHT | 3474 | 53.226 | 0.000 | 0.004 | 0.000 | 0.446 | 0.217 | 76.110 |
| KTINGSGSPHSKAQPLGT | 3475 | 53.049 | 0.015 | 0.004 | 0.001 | 0.515 | 0.222 | 68.656 |
| KTINKEGSPHSKAQNQQT | 3580 | 53.006 | 0.000 | 0.029 | 0.000 | 0.177 | 0.111 | 64.520 |
| KTCNASGSPHSKAQNQQT | 3476 | 52.998 | 0.000 | 0.011 | 0.000 | 0.897 | 0.141 | 67.934 |
| KAINGSGSPHSKAHNQET | 3477 | 52.973 | 0.000 | 0.030 | 0.000 | 0.035 | 0.058 | 71.809 |
| KTEGLSGSPHSKAQNQQT | 3478 | 52.891 | 0.000 | 0.000 | 0.020 | 0.104 | 0.155 | 104.529 |
| KTRDASGSPHSKAQNQQT | 3479 | 52.861 | 0.000 | 0.000 | 0.010 | 1.062 | 0.402 | 52.089 |
| KTSNGSGSPHSKAQNLQI | 3480 | 52.843 | 0.000 | 0.000 | 1.605 | 0.178 | 0.214 | 74.823 |
| KTGNGSGSPHSKAQIQQT | 3481 | 52.809 | 0.000 | 0.000 | 0.000 | 0.000 | 0.012 | 98.291 |
| KTVNGGGSPHSKAQNLQT | 3581 | 52.788 | 0.000 | 0.031 | 0.000 | 0.000 | 0.165 | 83.215 |
| KTDRSSGSPHSKAQNQQT | 3482 | 52.737 | 0.000 | 0.000 | 0.000 | 0.995 | 0.085 | 123.421 |
| KTINGSGSPHSKAQVRNT | 3483 | 52.735 | 0.000 | 0.101 | 0.011 | 0.230 | 0.423 | 68.893 |
| KTINGSGSPHSKAPSNQT | 3484 | 52.680 | 1.494 | 4.762 | 0.003 | 0.330 | 0.208 | 87.951 |
| KTINGSGSPHSKAQVGHT | 3485 | 52.624 | 0.000 | 0.000 | 0.006 | 0.535 | 0.192 | 106.448 |
| KNAIGSGSPHSKAQNQQT | 3486 | 52.516 | 0.000 | 0.000 | 0.000 | 0.165 | 0.198 | 117.939 |
| KAENGSGSPHSKAQNQQT | 3487 | 52.487 | 0.000 | 0.157 | 0.029 | 0.000 | 0.242 | 120.256 |
| KTINGSGSPHSKAQRDIT | 3488 | 52.415 | 0.098 | 0.000 | 0.008 | 1.784 | 0.605 | 88.122 |
| KTINGSGSPHSKAQMPNT | 3489 | 52.408 | 0.084 | 0.036 | 0.025 | 0.057 | 0.359 | 66.040 |
| KTVNGSGSPHSKSQNQQT | 3490 | 52.395 | 0.033 | 0.077 | 0.013 | 0.105 | 0.175 | 58.000 |
| KTIPAIGSPHSKAQNQQT | 3582 | 52.346 | 0.000 | 0.009 | 0.000 | 0.034 | 0.134 | 51.949 |
| KTINGSGSPHSKARGLQT | 3491 | 52.275 | 0.000 | 0.000 | 0.036 | 1.235 | 1.425 | 169.881 |
| KTELGSGSPHSKAQNQQT | 3492 | 52.232 | 0.000 | 0.007 | 0.006 | 0.532 | 0.088 | 87.314 |
| KAETGSGSPHSKAQNQQT | 3493 | 52.219 | 0.000 | 0.047 | 0.581 | 0.009 | 0.188 | 132.940 |
| KTINGSGSPHSKLQKQQT | 3494 | 52.144 | 0.615 | 0.477 | 1.071 | 1.113 | 0.429 | 61.833 |
| KTINGSGSPHSKAPSLQT | 3495 | 52.137 | 0.041 | 1.614 | 0.002 | 0.902 | 0.222 | 70.363 |
| KTINGSGSPHSKAQRDQT | 3496 | 51.897 | 0.069 | 0.014 | 0.040 | 0.867 | 0.554 | 102.317 |
| KTDVGSGSPHSKAQNQQT | 3497 | 51.849 | 0.000 | 0.007 | 0.000 | 0.385 | 0.560 | 115.774 |
| KTINGSGSPHSKNRDQQT | 3498 | 51.830 | 0.000 | 0.008 | 0.000 | 0.480 | 0.138 | 100.300 |
| KSINGSGSPHSKAPNLQT | 3499 | 51.812 | 0.000 | 0.256 | 0.000 | 0.085 | 0.139 | 59.270 |
| KTINGSGSPHSKAQAKGT | 3500 | 51.727 | 0.048 | 0.016 | 0.000 | 0.271 | 0.525 | 104.917 |
| KTVNGSGSPHSKAQDKQT | 3501 | 51.580 | 0.428 | 0.000 | 0.069 | 0.041 | 0.063 | 69.225 |
| KTINGGGSPHSKAQNPQA | 3583 | 51.574 | 0.000 | 0.000 | 0.000 | 0.192 | 0.000 | 102.792 |
| KTINGSGSPHSKAQSAHT | 3502 | 51.569 | 0.068 | 0.070 | 0.000 | 0.589 | 0.249 | 79.498 |
| KTINGNGSPHSKSQNQHT | 3584 | 51.379 | 0.000 | 0.054 | 0.000 | 0.000 | 0.082 | 56.614 |
| KTVPTSGSPHSKAQNQQT | 3503 | 51.348 | 0.013 | 0.000 | 0.000 | 1.017 | 0.338 | 102.651 |
| KTIDGSGSPHSKSQNHQT | 3504 | 51.307 | 0.000 | 0.000 | 0.000 | 0.000 | 0.269 | 63.174 |
| KTDVKSGSPHSKAQNQQT | 3505 | 51.296 | 0.000 | 0.000 | 0.000 | 0.515 | 0.224 | 53.601 |
| KAINRSGSPHSKAQDQQT | 3506 | 51.262 | 0.000 | 0.000 | 0.000 | 0.000 | 0.036 | 54.631 |
| KTINGSGSPHSKAQSTMT | 3507 | 51.249 | 0.018 | 0.002 | 0.002 | 0.321 | 0.341 | 73.213 |
| KTVNASGSPHSKAQNQLT | 3508 | 51.249 | 0.000 | 0.000 | 0.000 | 0.000 | 0.268 | 99.559 |
| KTINGSGSPHSKAQREMT | 3509 | 51.076 | 0.000 | 24.900 | 143.49 | 1.564 | 0.476 | 70.961 |
| KTVHGSGSPHSKAQSQQT | 3510 | 51.057 | 0.000 | 0.000 | 0.000 | 0.143 | 0.146 | 54.185 |
| KTINGGGSPHSKSQNRQT | 3585 | 51.017 | 0.000 | 0.000 | 0.000 | 0.000 | 0.421 | 149.370 |
| KTINGSGSPHSKAQYRAT | 3511 | 51.008 | 0.000 | 0.158 | 0.000 | 0.690 | 0.120 | 50.650 |
| KTINGGGSPHSKAQRQQT | 3586 | 50.998 | 0.000 | 0.041 | 0.000 | 0.991 | 0.142 | 147.942 |
| KTEPMSGSPHSKAQNQQT | 3512 | 50.960 | 0.203 | 0.000 | 0.000 | 1.816 | 0.415 | 126.322 |
| KTINGSGSPHSKNQWQQT | 3513 | 50.800 | 0.000 | 0.044 | 0.047 | 0.111 | 0.324 | 65.506 |
| KETAGSGSPHSKAQNQQT | 3514 | 50.762 | 0.000 | 0.027 | 0.000 | 1.706 | 0.054 | 212.795 |
| KTINGSGSPHSKAQRMNT | 3515 | 50.686 | 0.000 | 108.747 | 0.019 | 0.943 | 0.264 | 97.975 |
| KNNLGSGSPHSKAQNQQT | 3516 | 50.670 | 0.000 | 0.019 | 0.000 | 0.406 | 0.121 | 102.408 |
| KTINGSGSPHAKAQNHQT | 3517 | 50.667 | 0.211 | 0.140 | 0.051 | 0.101 | 0.090 | 80.603 |
| KTIIKNGSPHSKAQNQQT | 3587 | 50.587 | 0.000 | 0.000 | 0.000 | 0.000 | 0.751 | 75.547 |
| KTINGSGSPHSYHVNQQT | 3588 | 50.486 | 0.000 | 0.056 | 0.059 | 0.528 | 0.275 | 179.489 |
| KTINGSGSPHSKAGDSQT | 3518 | 50.457 | 0.614 | 0.236 | 0.008 | 1.062 | 0.071 | 74.355 |
| KTINGSGSPHSKLKSQQT | 3519 | 50.368 | 0.000 | 0.296 | 0.000 | 1.796 | 1.096 | 95.240 |
| KTINGSGSPHSKAQKIST | 3520 | 50.285 | 0.000 | 0.000 | 0.088 | 0.108 | 0.302 | 51.115 |
| KTEYNSGSPHSKAQNQQT | 3521 | 50.256 | 0.000 | 0.000 | 0.000 | 0.000 | 0.009 | 62.679 |
| KTINGSGSPHSKAPSMQT | 3522 | 50.249 | 0.000 | 0.000 | 0.004 | 0.941 | 0.460 | 75.504 |
| EAINGSGSPHSKAQNQQT | 3523 | 50.243 | 0.629 | 0.094 | 0.000 | 0.057 | 1.519 | 117.305 |
| KTINGSGSPHSKASPRQT | 3524 | 50.227 | 0.088 | 0.005 | 0.068 | 1.761 | 0.530 | 67.241 |
| KTINGSGSPHSKRMEQQT | 3525 | 50.177 | 0.000 | 0.000 | 0.000 | 1.327 | 0.208 | 81.769 |
| KTINGSGSPHSKAQYQNT | 3526 | 50.099 | 0.000 | 0.008 | 0.000 | 0.017 | 0.119 | 71.846 |
| KTERVSGSPHSKAQNQQT | 3589 | 96.943 | 0.000 | 0.000 | 0.000 | 0.000 | 0.144 | 135.438 |
| KAEIGHDSPHKSGQNQQT | 1754 | 63.249 | 0.000 | 0.000 | 0.000 | 0.060 | 0.024 | 27.173 |

[1460] Table 16 provides the peptide sequence of 341 matured capsid variants, and the fold enrichment of these matured capsid variants relative to the AAV9 control that demonstrated a 75-fold or greater increase in expression in the brain of NHPs relative to the AAV9 control and had a fold-change in expression that was less than 2 relative to the AAV9 control in the liver and the DRG.

TABLE 16
NGS fold-enrichment of TTM-001 and TTM-002 matured
AAV capsid variants in the brain of NHPs

| | | Fold Enrichment relative to AAV9 | | | | | | |
|---|---|---|---|---|---|---|---|---|
| | SEQ | | | | | Liver | Liver | |
| | ID | Brain | DRG | Heart | Muscle | RNA | DNA | Brain |
| Sequence | NO: | (NHP) | (NHP) | (NHP) | (NHP) | (NHP) | (NHP) | (Mouse) |
| KTFNRSGSPHSKAQNQQI | 3591 | 86.359 | 0.000 | 113.67 | 0.000 | 0.000 | 0.092 | 25.568 |
| KTIIGSGSPHSKAQNRHT | 3239 | 217.176 | 0.000 | 0.000 | 0.000 | 0.000 | 0.000 | 210.515 |
| KTFPGSGSPHSKVQNQQT | 3240 | 199.720 | 0.000 | 0.000 | 0.000 | 0.000 | 0.967 | 97.703 |
| KTEKMSGSPHSKAQNQQT | 3241 | 169.461 | 0.523 | 0.000 | 0.000 | 0.000 | 0.158 | 109.161 |
| KAINGHDSPHKSGQIRQT | 3606 | 108.510 | 0.000 | 23.908 | 0.000 | 0.132 | 0.261 | 8.862 |
| KTINGHDSPHKIGQNQHA | 3607 | 77.321 | 0.000 | 18.836 | 0.028 | 0.220 | 0.132 | 7.578 |
| KEINGRGSPHSKAQNQQT | 3527 | 134.390 | 0.239 | 0.000 | 0.000 | 0.000 | 0.232 | 52.311 |
| KTVNRNGSPHSKAQNQQT | 3528 | 133.016 | 0.000 | 0.416 | 0.000 | 0.000 | 0.000 | 85.361 |
| KAINGYDSPHKSGQKQQT | 3608 | 83.803 | 0.041 | 9.491 | 0.000 | 0.031 | 0.150 | 13.057 |
| KTVNGSGSPHSKARDQQT | 3242 | 124.789 | 0.123 | 0.039 | 0.312 | 0.569 | 0.454 | 132.137 |
| KTESGHDSPHKSGQNQQT | 3609 | 86.513 | 0.000 | 7.414 | 0.000 | 0.000 | 0.038 | 13.163 |
| KTINGHDSPHKSGQSVQT | 3610 | 75.748 | 0.010 | 6.808 | 0.000 | 0.165 | 0.058 | 9.321 |
| KTFNGSGSPHSKAPNLQT | 3243 | 121.436 | 0.000 | 0.167 | 0.000 | 0.000 | 0.015 | 168.920 |
| KTEKTSGSPHSKAQNQQT | 3244 | 120.337 | 0.000 | 0.355 | 0.000 | 0.000 | 0.119 | 101.467 |
| TTINGHDSPHKSGQNQQT | 3611 | 108.963 | 1.512 | 3.445 | 0.869 | 0.659 | 1.109 | 14.788 |
| KTINGHESPHKSGRSQQT | 3612 | 97.106 | 0.000 | 3.329 | 0.022 | 0.000 | 0.181 | 9.378 |
| KTINGSGSPHSKAHVRQT | 3245 | 119.798 | 0.000 | 0.000 | 0.262 | 0.694 | 1.039 | 165.590 |
| KTVNGSGSPHSKAPNQHT | 3246 | 117.207 | 0.000 | 0.109 | 0.000 | 0.000 | 0.074 | 51.008 |
| KTEKISGSPHSKAQNQQT | 3247 | 116.603 | 0.000 | 0.000 | 0.000 | 0.000 | 0.426 | 102.978 |
| KTINGPGSPHSKAHNQQT | 3529 | 115.742 | 0.146 | 0.000 | 0.235 | 0.000 | 0.513 | 52.508 |
| KTINGHDSPHKSGQNKLE | 3613 | 76.204 | 0.000 | 1.430 | 0.000 | 0.015 | 0.031 | 12.419 |
| KTVNGSGSPHSKTQSQQT | 3248 | 115.086 | 0.000 | 0.726 | 0.000 | 0.000 | 0.340 | 63.248 |
| TTINGSGSPHSKAQNQQT | 3249 | 114.856 | 1.340 | 14.856 | 0.827 | 1.281 | 0.957 | 72.058 |
| KSINESGSPHSKAQNQQI | 3250 | 113.833 | 0.000 | 0.000 | 0.000 | 0.000 | 0.000 | 67.649 |
| KTINGHDSPHKTGQNQQK | 3614 | 77.562 | 0.000 | 1.056 | 0.000 | 0.000 | 0.000 | 6.379 |
| KTERTSGSPHSKAQNQQT | 3251 | 112.957 | 0.000 | 0.009 | 0.000 | 1.128 | 0.207 | 117.374 |
| KTINGSGSPHSKAQPAKT | 3252 | 111.472 | 0.331 | 0.000 | 1.089 | 0.044 | 1.796 | 215.275 |
| KTINGRGSPHKRGQNQQT | 3837 | 120.889 | 0.100 | 0.814 | 0.434 | 0.458 | 0.614 | 13.988 |
| KTINGSGSPHTKAQNPPT | 3592 | 147.061 | 0.000 | 0.727 | 0.000 | 0.000 | 0.000 | 34.425 |
| KTEKSSGSPHSKAQNQQT | 3253 | 107.470 | 0.000 | 0.016 | 0.014 | 0.977 | 0.179 | 100.177 |
| KAINGHDNPHKSGQNQQT | 3615 | 88.906 | 0.297 | 0.721 | 0.482 | 0.222 | 0.130 | 9.702 |
| KTSYGNGSPHSKAQNQQT | 3530 | 105.937 | 0.000 | 0.000 | 0.000 | 0.000 | 0.114 | 105.894 |
| KTINGQDSPHKSGQHQQA | 3616 | 85.657 | 1.127 | 0.579 | 0.000 | 0.193 | 0.557 | 5.582 |
| KTEKGSGSPHSKAQNQQT | 3254 | 105.614 | 0.053 | 0.031 | 0.000 | 0.586 | 0.169 | 84.653 |
| KTINGSGSPHSKSQTQQN | 3255 | 104.474 | 0.000 | 0.131 | 0.000 | 0.084 | 0.038 | 54.021 |
| KTERISGSPHSKAQNQQT | 3256 | 103.692 | 0.000 | 0.000 | 0.000 | 0.062 | 0.370 | 89.637 |
| KTERASGSPHSKAQNQQT | 3257 | 103.669 | 0.000 | 0.000 | 0.000 | 0.127 | 0.070 | 115.550 |
| KSINGHDSPHKSGQIQHT | 3617 | 87.598 | 0.000 | 0.480 | 0.000 | 0.714 | 0.347 | 13.872 |
| KELHGSGSPHSKAQNQQT | 3258 | 102.680 | 0.000 | 0.000 | 0.000 | 1.634 | 0.592 | 96.554 |
| KAINGSGSPHSKAQNLAT | 3259 | 101.954 | 0.000 | 10.954 | 8.655 | 0.298 | 0.239 | 116.685 |
| KTVNGSGSPHSKSQNQLT | 3260 | 101.327 | 0.000 | 0.035 | 0.000 | 0.000 | 0.025 | 80.716 |
| KAINGHDSPHKSGPRQQT | 3618 | 145.142 | 0.000 | 0.408 | 0.000 | 0.000 | 0.000 | 8.259 |
| KTVNGHDSPHKSGHTQQT | 3619 | 82.246 | 0.000 | 0.378 | 1.142 | 0.000 | 0.123 | 6.160 |
| KSINGHDSPHKSGQRQHT | 3620 | 80.132 | 0.000 | 0.357 | 0.000 | 0.000 | 0.000 | 9.851 |
| KTERNSGSPHSKAQNQQT | 3261 | 99.892 | 0.000 | 0.000 | 0.000 | 0.000 | 0.107 | 87.392 |
| KSLNGSGSPHTKAQNQQT | 3593 | 81.515 | 0.197 | 0.333 | 0.000 | 0.000 | 0.085 | 45.140 |
| KSVNGNGSPHSKAQNQQT | 3531 | 99.385 | 0.000 | 1.329 | 0.000 | 0.359 | 0.079 | 51.016 |
| KAINGHDSPHKSAQSQQT | 3621 | 95.204 | 0.146 | 0.310 | 0.000 | 0.699 | 0.058 | 14.595 |
| KSIYGHESPHKSGQNQQS | 3622 | 90.947 | 0.817 | 0.310 | 0.000 | 0.000 | 0.243 | 8.064 |
| KTFNGSGSPHSKAQGQQT | 3262 | 99.253 | 0.000 | 0.208 | 0.000 | 0.128 | 0.099 | 81.459 |
| KTVNGHDSPHKSLQNQQT | 3623 | 112.925 | 0.000 | 0.301 | 0.059 | 0.000 | 0.322 | 16.726 |
| KTINGSGSPHGWVQNQQT | 3532 | 97.122 | 0.000 | 0.000 | 0.000 | 1.240 | 1.975 | 290.720 |
| KTINGHGSPHSKAQNPQT | 3838 | 83.478 | 0.000 | 0.288 | 0.219 | 0.000 | 0.260 | 11.001 |
| KTSNGYDSPHKSGQKQQT | 3624 | 77.001 | 0.032 | 0.286 | 0.000 | 0.000 | 0.016 | 8.813 |
| KTVNGHDSPHKSGRNQET | 3625 | 102.695 | 0.000 | 0.286 | 0.000 | 0.000 | 0.027 | 11.958 |
| KTTNGHDSPHKSGQTQLT | 3626 | 115.637 | 0.000 | 0.283 | 0.000 | 0.052 | 0.321 | 17.885 |
| KAINGHDSPHKSEKNQQT | 3627 | 77.103 | 0.000 | 0.274 | 0.000 | 0.000 | 0.000 | 26.868 |
| KTERVSGSPHSKAQNQQT | 3263 | 96.943 | 0.000 | 0.000 | 0.000 | 0.000 | 0.144 | 135.438 |
| KTINGSGSPHSKALNRQS | 3264 | 96.843 | 0.136 | 0.532 | 0.000 | 0.042 | 0.178 | 55.945 |
| KTERLSGSPHSKAQNQQT | 3265 | 95.857 | 0.000 | 0.004 | 0.005 | 0.126 | 0.260 | 102.372 |
| KIINGRDSPHKSGQDQQT | 3628 | 78.773 | 0.000 | 0.254 | 0.000 | 0.000 | 0.156 | 16.132 |
| KTDNGSGSPHSKAHNQQT | 3266 | 95.164 | 0.000 | 0.000 | 0.000 | 0.000 | 0.027 | 55.313 |
| KTFHGSGSPHSKTQNQQT | 3267 | 94.714 | 0.000 | 0.210 | 0.120 | 0.000 | 0.000 | 51.119 |
| KTISGHDSPHKTGHNQQT | 3629 | 92.490 | 0.000 | 0.233 | 0.057 | 0.730 | 0.000 | 8.823 |
| KTVNAHDSPHKSGQNQLT | 3630 | 79.137 | 0.000 | 0.233 | 0.178 | 0.753 | 0.045 | 29.254 |
| KTINGGGSPHSKAQTQQI | 3533 | 92.345 | 0.000 | 0.000 | 0.000 | 0.000 | 0.023 | 54.199 |
| KSINGYDSPHKSGQTQQT | 3631 | 79.227 | 1.817 | 0.226 | 0.000 | 0.000 | 1.148 | 4.497 |
| KTINGHESPHKSGQTQQI | 3632 | 86.089 | 0.000 | 0.222 | 0.000 | 0.000 | 0.024 | 3.989 |
| KTINGHDSPHKSGQSKQA | 3633 | 101.460 | 0.000 | 0.222 | 0.000 | 0.185 | 0.114 | 7.510 |
| KTSNGSGSPHSKAQNPPT | 3268 | 91.528 | 0.000 | 0.000 | 0.000 | 0.000 | 0.039 | 51.541 |
| ETINGSGSPHSKAQNLQT | 3269 | 90.969 | 0.221 | 1.023 | 0.197 | 0.179 | 0.813 | 107.216 |
| KTVHGNGSPHSKAQNQQT | 3534 | 90.073 | 0.000 | 0.000 | 0.000 | 0.000 | 0.304 | 97.003 |
| NTINGSGSPHSKAQNQQT | 3270 | 90.017 | 1.712 | 1.261 | 1.171 | 0.923 | 0.540 | 55.179 |
| KTINGGGSPHSKAQNQQC | 3535 | 89.301 | 0.219 | 0.000 | 0.000 | 0.287 | 0.319 | 53.840 |
| KTENMSGSPHSKAQNQQT | 3271 | 89.247 | 0.000 | 0.000 | 0.000 | 0.000 | 0.260 | 130.568 |
| KTENVSGSPHSKAQNQQT | 3272 | 88.506 | 0.000 | 0.000 | 0.000 | 0.964 | 0.112 | 108.591 |
| KTSSGSGSPHSKAQYQQT | 3273 | 87.304 | 0.000 | 0.000 | 0.000 | 0.000 | 0.299 | 58.143 |
| KTIDGGGSPHSKAQNKQT | 3536 | 85.019 | 0.000 | 0.000 | 0.000 | 0.000 | 0.477 | 55.517 |
| KTEKVSGSPHSKAQNQQT | 3274 | 84.558 | 0.000 | 0.022 | 0.000 | 0.873 | 0.424 | 112.185 |
| KAINGSGSPHSKAQDQET | 3275 | 84.080 | 0.000 | 0.000 | 0.000 | 0.194 | 0.027 | 87.637 |
| KTCNKSGSPHSKAQNQQT | 3276 | 83.992 | 0.000 | 0.000 | 0.165 | 0.283 | 0.000 | 119.496 |
| KTINGGGSPHSKAQNQLI | 3537 | 83.881 | 0.000 | 0.000 | 0.000 | 0.046 | 0.387 | 78.383 |
| KNINGGGSPHSKAQNQQT | 3538 | 83.083 | 0.000 | 0.042 | 0.000 | 0.000 | 0.000 | 75.913 |
| KTEHLSGSPHSKAQNQQT | 3277 | 83.080 | 0.000 | 0.000 | 0.012 | 0.021 | 0.189 | 69.494 |
| KAIIGHESPHKSGQNQQT | 3634 | 88.563 | 0.000 | 0.150 | 0.000 | 0.062 | 0.145 | 8.530 |
| KTINGHDSPHKTGQNQPP | 3635 | 77.357 | 0.000 | 0.149 | 0.000 | 0.000 | 0.096 | 8.865 |
| KAINGHDSPHKSGQSPQT | 3636 | 75.734 | 0.095 | 0.148 | 0.000 | 0.000 | 0.238 | 14.195 |
| KAEMGSGSPHSKAQNQQT | 3278 | 83.049 | 0.000 | 0.020 | 0.000 | 0.768 | 0.112 | 135.019 |
| KATNGSGSPHSKAQNHQT | 3279 | 82.627 | 0.000 | 0.176 | 0.000 | 0.155 | 0.057 | 66.207 |
| KTIKGNDSPHKSVQNQQT | 3637 | 85.986 | 0.000 | 0.135 | 0.000 | 0.263 | 0.000 | 8.603 |
| KAIKGSGSPHSKAQDQQT | 3280 | 82.258 | 0.000 | 0.000 | 0.000 | 0.108 | 0.000 | 85.178 |
| KTINGGGSPHSKSQNQLT | 3539 | 82.231 | 0.000 | 0.070 | 0.000 | 0.000 | 0.498 | 126.986 |
| KTEFGHDSPHKSGQNQQT | 3638 | 77.245 | 0.000 | 0.124 | 0.000 | 0.561 | 0.063 | 16.337 |
| KTINGHDSPHKSAQNYQT | 3639 | 130.375 | 0.000 | 0.124 | 0.000 | 0.097 | 0.123 | 19.443 |
| KTFNGSASPHSKALNQQT | 3839 | 84.258 | 0.000 | 0.122 | 0.000 | 0.104 | 0.037 | 31.855 |
| KTINGCGSPHASGQNQQT | 3840 | 132.540 | 0.000 | 0.121 | 0.042 | 0.000 | 0.059 | 1.857 |
| KTINAHDSPHKIGQNHQT | 3640 | 106.832 | 0.000 | 0.121 | 0.000 | 0.000 | 0.231 | 5.074 |
| KTVNGNGSPHSKAQNKQT | 3540 | 81.481 | 0.000 | 0.000 | 0.000 | 0.000 | 0.122 | 69.455 |
| KTINGHESPHKSAQNRQT | 3641 | 95.531 | 0.000 | 0.113 | 0.000 | 0.130 | 0.082 | 4.815 |
| KTINGSGSPHSKGHWQQT | 3281 | 81.434 | 0.000 | 0.000 | 0.000 | 0.000 | 1.011 | 65.252 |
| KTTNGHDSPHKSGQNQQG | 3642 | 85.113 | 0.000 | 0.107 | 0.000 | 0.000 | 0.017 | 10.555 |
| KTIKGQDSPHKIGQNQQT | 3643 | 110.357 | 0.000 | 0.103 | 0.058 | 0.166 | 0.135 | 11.829 |
| KTDKTSGSPHSKAQNQQT | 3282 | 81.430 | 0.000 | 0.000 | 0.000 | 1.362 | 0.291 | 169.515 |
| KTVNGHDSPHKSGQNHLT | 3644 | 81.516 | 0.000 | 0.100 | 0.017 | 0.000 | 0.028 | 16.096 |
| KTFKGSGSPHSKAPNQQT | 3283 | 80.890 | 0.000 | 0.000 | 0.000 | 0.000 | 0.017 | 71.144 |
| KSINGHDSPHKSGQYQHT | 3645 | 88.195 | 0.000 | 0.099 | 0.000 | 0.000 | 0.149 | 14.485 |
| KTINGNDSPHKSVQNHQT | 3646 | 120.002 | 0.000 | 0.099 | 0.788 | 0.000 | 0.000 | 7.920 |
| KTVNGSGSPHSKAQNQLI | 3284 | 80.509 | 0.000 | 0.000 | 0.000 | 0.000 | 0.166 | 71.156 |
| KTINGSGSPHSKRPEQQT | 3285 | 80.418 | 0.000 | 0.013 | 0.000 | 0.149 | 0.361 | 50.319 |
| KTINGSGSPHSKAQRTMT | 3286 | 80.388 | 0.000 | 0.022 | 0.170 | 1.812 | 1.025 | 100.248 |
| KTITGHDSPHKSGQNQWT | 3647 | 81.658 | 0.000 | 0.090 | 0.000 | 0.936 | 0.000 | 7.744 |
| KTNNGHDSPHKSVQNQHT | 3648 | 115.172 | 0.000 | 0.083 | 0.000 | 0.000 | 0.062 | 7.934 |
| KTEKASGSPHSKAQNQQT | 3287 | 80.285 | 0.000 | 0.041 | 0.000 | 0.000 | 0.261 | 90.390 |
| KTIDGHDSPHKSGQNQHA | 3649 | 91.058 | 0.000 | 0.082 | 0.000 | 0.000 | 0.000 | 10.781 |
| KSDQGSGSPHSKAQNQQT | 3288 | 80.076 | 0.000 | 0.000 | 0.000 | 0.993 | 0.124 | 151.911 |
| KTVNGHDSPHKSGQTRQT | 3650 | 133.276 | 0.251 | 0.080 | 0.093 | 0.034 | 0.129 | 7.174 |
| KTVNGHDSPHKSGQNLHT | 3651 | 88.080 | 0.000 | 0.080 | 0.000 | 0.000 | 0.039 | 11.363 |
| KAISGHDSPHKSGLNQQT | 3652 | 78.846 | 0.000 | 0.079 | 0.000 | 0.000 | 0.015 | 11.045 |
| KTEITSGSPHSKAQNQQT | 3289 | 79.620 | 0.000 | 0.163 | 0.000 | 0.332 | 0.074 | 76.686 |
| KTDKSSGSPHSKAQNQQT | 3290 | 79.470 | 0.055 | 0.012 | 0.000 | 1.437 | 0.367 | 141.351 |
| KAINGHDSPHKSAQNQET | 3653 | 90.402 | 0.000 | 0.073 | 0.000 | 0.746 | 0.000 | 10.674 |
| KTITGHDSPHKSGQHLQT | 3654 | 137.945 | 0.000 | 0.072 | 0.000 | 0.000 | 0.000 | 4.187 |
| KTIDGSGSPHSKAQNQQH | 3291 | 79.090 | 0.000 | 0.000 | 0.000 | 0.136 | 0.049 | 57.914 |
| KTVNGNGSPHSKAQNQHT | 3541 | 78.849 | 0.000 | 0.000 | 0.000 | 0.000 | 0.045 | 54.086 |
| KNTNGSGSPHSKAQNQQT | 3292 | 78.445 | 0.000 | 0.000 | 0.000 | 0.571 | 0.177 | 89.719 |
| KTINGHDSPHKSRLNQPT | 3655 | 92.883 | 0.000 | 0.070 | 0.050 | 0.904 | 1.075 | 5.598 |
| KTETHSGSPHSKAQNQQT | 3293 | 77.974 | 0.000 | 0.067 | 0.000 | 0.000 | 0.512 | 57.287 |
| KTVDGHDSPHKSGQKQQT | 3656 | 78.802 | 0.000 | 0.069 | 0.000 | 0.157 | 0.342 | 7.200 |
| KTINGQDSPHKSGQNQDT | 3657 | 82.075 | 0.000 | 0.067 | 0.000 | 0.225 | 0.144 | 9.626 |
| KTINGGGSPHSKALNQQN | 3542 | 77.822 | 0.000 | 0.131 | 0.000 | 0.000 | 0.274 | 69.884 |
| KTIEGHDSPHKSGRNQQT | 3658 | 75.838 | 0.000 | 0.065 | 0.017 | 0.000 | 0.079 | 7.818 |
| KTTNGHDSPHKSGQNLLT | 3659 | 77.738 | 0.130 | 0.064 | 0.185 | 0.424 | 0.326 | 15.192 |
| KTINGHDSPHKSGQLVIT | 3660 | 76.781 | 0.089 | 0.064 | 0.000 | 0.338 | 0.475 | 11.323 |
| KTVNGHDSPHKSRQSQQT | 3661 | 76.458 | 0.000 | 0.063 | 0.000 | 0.000 | 0.021 | 8.136 |
| KTINGSGSPHSKALHQHT | 3294 | 77.502 | 0.000 | 0.052 | 0.041 | 0.000 | 0.188 | 68.196 |
| KTINGHDSPHKSGRTQET | 3662 | 81.599 | 0.000 | 0.062 | 0.000 | 0.000 | 0.137 | 7.270 |
| KTINGHDSPHKSVQTHQT | 3663 | 77.309 | 0.237 | 0.062 | 0.000 | 0.000 | 0.116 | 7.519 |
| KTINGTGSPHSKAQNHQI | 3543 | 77.089 | 0.171 | 0.000 | 0.000 | 0.000 | 0.166 | 54.281 |
| KTINGSGSPHSKAQHRIT | 3295 | 76.849 | 0.105 | 0.499 | 0.170 | 1.424 | 0.214 | 127.000 |
| KTINGSGSPHSKAQYIHT | 3296 | 76.170 | 0.000 | 0.014 | 0.033 | 1.523 | 0.168 | 59.649 |
| KTSNGHDSPHKSGQNQPA | 3664 | 75.834 | 0.000 | 0.056 | 0.000 | 0.000 | 0.000 | 8.501 |
| KTEGKHDSPHKSGQNQQT | 3665 | 98.384 | 0.000 | 0.056 | 0.000 | 0.000 | 0.000 | 10.345 |
| KTENISGSPHSKAQNQQT | 3297 | 76.072 | 0.000 | 0.000 | 0.000 | 0.115 | 0.132 | 83.118 |
| KVINGHDSPHKSGQTQQT | 3666 | 91.665 | 0.000 | 0.055 | 1.526 | 0.311 | 0.000 | 7.391 |
| KTIIGGGSPHSKAHNQQT | 3544 | 75.872 | 0.000 | 0.050 | 0.000 | 0.000 | 0.235 | 65.492 |
| KTINGPDSPHKIGQNQQS | 3667 | 85.726 | 0.000 | 0.055 | 0.171 | 0.000 | 0.063 | 10.055 |
| KTINGSGSPHSKAQKFET | 3298 | 75.788 | 0.000 | 0.000 | 0.028 | 0.108 | 0.093 | 65.588 |
| KTSNESGSPHSKAQNHQT | 3299 | 75.720 | 0.000 | 0.000 | 0.000 | 0.169 | 0.217 | 70.590 |
| KTINGSGSPHSKAQFPST | 3300 | 75.677 | 0.000 | 0.004 | 0.000 | 0.849 | 0.127 | 119.712 |
| KTERPSGSPHSKAQNQQT | 3301 | 75.669 | 0.000 | 0.029 | 0.000 | 0.000 | 0.156 | 73.894 |
| KAVNGHDSPHKSVQNQQT | 3668 | 81.051 | 0.448 | 0.051 | 0.000 | 0.665 | 0.091 | 11.288 |
| KTINGNGSPHSKAQNPLT | 3545 | 75.269 | 0.000 | 0.000 | 0.000 | 0.366 | 0.000 | 53.583 |
| KSIKGNGSPHSKAQNQQT | 3546 | 75.196 | 0.000 | 0.000 | 0.000 | 0.000 | 0.000 | 90.251 |
| KTINGHDSPHKSRQDQHT | 3669 | 75.595 | 0.000 | 0.049 | 0.118 | 0.030 | 0.045 | 8.540 |
| KAINGPDSPHKSGQKQQT | 3670 | 78.213 | 0.464 | 0.047 | 0.000 | 0.323 | 0.162 | 10.395 |
| KTINGHDSPHKSRQSQHT | 3671 | 88.544 | 0.499 | 0.046 | 0.000 | 0.059 | 0.032 | 8.324 |
| KTIYGHDSPHKSVQNQLT | 3672 | 92.381 | 0.000 | 0.043 | 0.000 | 0.103 | 0.016 | 12.323 |
| KTVNGHDSPHKSGQNLLT | 3673 | 83.969 | 0.114 | 0.040 | 0.023 | 0.000 | 0.035 | 18.894 |
| KTESAHDSPHKSGQNQQT | 3674 | 80.810 | 0.000 | 0.039 | 0.000 | 0.000 | 0.000 | 13.338 |
| KTENKSGSPHSKAQNQQT | 3594 | 103.854 | 0.000 | 0.037 | 0.000 | 0.000 | 0.119 | 31.182 |
| KTTNGQDSPHKSGQNQQS | 3675 | 92.419 | 0.000 | 0.037 | 0.043 | 0.000 | 0.079 | 7.592 |
| KTDKGSGSPHSKAQNQQT | 3595 | 94.572 | 0.000 | 0.037 | 0.000 | 0.951 | 0.367 | 47.888 |
| KTIDGHDSPHKSGRNQQI | 3676 | 80.240 | 0.000 | 0.037 | 0.000 | 0.040 | 0.144 | 10.363 |
| KTINGYDSPHKSGQYQHT | 3677 | 81.534 | 0.000 | 0.036 | 0.000 | 0.000 | 0.000 | 10.524 |
| KTDNGHDSPHKSRQNQQT | 3678 | 105.312 | 0.000 | 0.033 | 0.000 | 0.000 | 0.018 | 7.931 |
| KTINGHDSPHKSWVRQQT | 3679 | 125.537 | 0.000 | 0.033 | 0.000 | 0.291 | 0.174 | 11.687 |
| KTINGHESPHKSGQNQHS | 3680 | 92.248 | 0.000 | 0.032 | 0.012 | 0.090 | 0.088 | 9.720 |
| KTVNGHDSPHKIGHNQQT | 3681 | 120.985 | 0.000 | 0.029 | 0.000 | 0.000 | 0.009 | 10.167 |
| KTCNGHDSPHKSGRNQQT | 3682 | 94.616 | 0.000 | 0.025 | 0.000 | 0.000 | 0.128 | 12.496 |
| KTINGNGSPHSKAQNHQA | 3841 | 88.274 | 0.000 | 0.024 | 0.000 | 0.000 | 0.041 | 36.754 |
| KNVVGHDSPHKSGQNQQT | 3683 | 75.330 | 0.000 | 0.024 | 0.000 | 0.063 | 0.049 | 8.077 |
| KTELWHDSPHKSGQNQQT | 3684 | 85.323 | 0.057 | 0.020 | 0.000 | 0.000 | 0.243 | 9.915 |
| KTELRHDSPHKSGQNQQT | 3685 | 98.098 | 0.000 | 0.019 | 0.000 | 0.000 | 0.007 | 6.588 |
| KTINGHDSPHKSNAWQQT | 3686 | 84.825 | 0.000 | 0.016 | 0.000 | 0.000 | 0.132 | 15.788 |
| KTDAGHDSPHKSGQNQQT | 3687 | 88.924 | 0.000 | 0.013 | 0.000 | 1.076 | 0.070 | 18.107 |
| KTEVGHDSPHKSGQNQQT | 3688 | 112.457 | 0.000 | 0.011 | 0.000 | 0.000 | 0.138 | 13.125 |
| KTESRHDSPHKSGQNQQT | 3689 | 81.766 | 0.000 | 0.011 | 0.000 | 0.052 | 0.036 | 6.975 |
| KSELGHDSPHKSGQNQQT | 3690 | 107.059 | 0.000 | 0.005 | 0.000 | 0.000 | 0.055 | 13.285 |
| KTINGHDSPHKSGQSVPT | 3691 | 77.840 | 0.000 | 0.003 | 0.000 | 0.136 | 0.061 | 6.768 |
| KTINGHESPHKSGQNIQP | 3692 | 253.840 | 0.000 | 0.000 | 0.000 | 0.000 | 0.000 | 14.042 |
| KTEMKHDSPHKSGQNQQT | 3693 | 240.075 | 0.000 | 0.000 | 0.000 | 0.000 | 0.000 | 3.183 |
| KTINGHDSPHKSVQNHLN | 3694 | 196.758 | 0.000 | 0.000 | 0.000 | 0.000 | 0.000 | 14.557 |
| KTINGHDSPHKIGLDQQT | 3695 | 165.627 | 0.000 | 0.000 | 0.000 | 1.942 | 0.000 | 5.469 |
| KTSNASGSPHSKAQHQQT | 3596 | 165.206 | 0.000 | 0.000 | 0.000 | 0.000 | 0.082 | 40.558 |
| KTINGHDSPHKRGPDQQS | 3696 | 160.084 | 0.000 | 0.000 | 0.000 | 0.000 | 0.000 | 2.923 |
| KTINGMGSPHSKTQNQQT | 3842 | 158.728 | 0.000 | 0.000 | 0.000 | 0.000 | 0.638 | 47.809 |
| KTIKGHDSPHKSGESQQT | 3697 | 142.264 | 0.000 | 0.000 | 0.000 | 0.000 | 0.218 | 4.176 |
| KTEGWHDSPHKSGQNQQT | 3698 | 142.064 | 0.000 | 0.000 | 0.000 | 0.000 | 0.264 | 11.785 |
| KTINGHDSPHKHGQNHQT | 3699 | 141.405 | 0.191 | 0.000 | 0.000 | 0.000 | 0.000 | 10.214 |
| KTEQLHDSPHKSGQNQQT | 3700 | 138.345 | 0.000 | 0.000 | 0.000 | 0.000 | 0.000 | 12.606 |
| KTVNGTGSPHSKAQNQLT | 3843 | 137.639 | 0.000 | 0.000 | 0.000 | 0.000 | 0.277 | 48.950 |
| KTIIGHDSPHKSGQYQHT | 3701 | 131.825 | 0.000 | 0.000 | 0.000 | 0.000 | 0.211 | 5.762 |
| KTSNGHDSPHKSVQNKQT | 3702 | 130.640 | 0.000 | 0.000 | 0.000 | 0.172 | 0.039 | 11.850 |
| KIVNGQVSPHKSGQNQQT | 3703 | 129.649 | 0.000 | 0.000 | 0.000 | 0.000 | 0.031 | 16.942 |
| KTVNGHDSPHKSGQRQLT | 3704 | 129.641 | 0.000 | 0.000 | 0.000 | 0.000 | 0.487 | 20.145 |
| KTVNGHDSPHKIGQNQLT | 3705 | 128.582 | 0.000 | 0.000 | 0.499 | 0.027 | 0.199 | 20.957 |
| KTINGHDSPHKSGQIIVT | 3706 | 125.245 | 0.000 | 0.000 | 0.151 | 0.000 | 0.379 | 6.808 |
| KTEKIHDSPHKSGQNQQT | 3707 | 125.178 | 0.000 | 0.000 | 0.000 | 0.000 | 0.000 | 17.604 |
| KTENAHDSPHKSGQNQQT | 3708 | 124.477 | 0.000 | 0.000 | 0.000 | 0.000 | 0.062 | 15.805 |
| KIGNGHESPHKSGQNQQT | 3709 | 123.324 | 0.000 | 0.000 | 0.000 | 0.000 | 0.000 | 11.198 |
| KEVMGHDSPHKSGQNQQT | 3710 | 121.107 | 0.000 | 0.000 | 0.000 | 0.000 | 0.000 | 17.191 |
| KTEVKHDSPHKSGQNQQT | 3711 | 119.733 | 0.000 | 0.000 | 0.000 | 0.000 | 0.000 | 5.550 |
| KTINGYDSPHKSGQKQST | 3712 | 119.615 | 0.000 | 0.000 | 0.000 | 0.000 | 0.000 | 7.970 |
| KTIHGNGSPHSKAQNQET | 3844 | 117.388 | 0.000 | 0.000 | 0.000 | 0.000 | 0.000 | 38.874 |
| KYQVGHDSPHKSGQNQQT | 3713 | 112.797 | 0.000 | 0.000 | 0.000 | 0.000 | 0.542 | 9.335 |
| KTEAMHDSPHKSGQNQQT | 3714 | 111.765 | 0.000 | 0.000 | 0.000 | 0.000 | 0.000 | 16.142 |
| KTIKGDDSPHKSVQNQQT | 3715 | 109.397 | 0.000 | 0.000 | 0.000 | 0.000 | 0.000 | 19.125 |
| KTINGHDSPHKSVQSHQT | 3716 | 109.375 | 0.107 | 0.000 | 0.319 | 0.000 | 0.547 | 12.617 |
| KTINGHDSPHKSGQFVVT | 3717 | 108.725 | 0.000 | 0.000 | 0.000 | 0.124 | 0.406 | 10.179 |
| KTVNGHDSPHKSRQNLQT | 3718 | 107.496 | 0.205 | 0.000 | 0.000 | 1.934 | 0.062 | 8.616 |
| KATNGHNSPHKSGQNQET | 3719 | 106.806 | 0.000 | 0.000 | 0.000 | 0.000 | 0.000 | 10.566 |
| KAINGHDSPHKSAQNQQI | 3720 | 106.539 | 0.000 | 0.000 | 0.000 | 0.000 | 0.113 | 21.786 |
| KTEHGHDSPHKSGQNQQT | 3721 | 106.486 | 0.000 | 0.000 | 0.000 | 0.000 | 0.006 | 14.956 |
| KTVENHDSPHKSGQNQQT | 3722 | 106.468 | 0.000 | 0.000 | 0.000 | 0.000 | 0.156 | 9.246 |
| KTIYGHDSPHKSGQSQPT | 3723 | 106.431 | 0.000 | 0.000 | 0.000 | 0.155 | 0.137 | 6.562 |
| KTISGHESPHKSGQNEQT | 3724 | 105.740 | 0.000 | 0.000 | 0.000 | 0.378 | 1.384 | 9.156 |
| KAIIGHDSPHKSAQNQQT | 3725 | 105.292 | 0.000 | 0.000 | 0.000 | 0.000 | 0.553 | 16.793 |
| KAIDGHDSPHKSGQNQLT | 3726 | 104.701 | 0.331 | 0.000 | 0.000 | 0.201 | 0.638 | 16.109 |
| KTIMGHDSPHKSVQNQQT | 3727 | 104.683 | 0.000 | 0.000 | 0.000 | 0.000 | 0.000 | 8.029 |
| KEVGGHDSPHKSGQNQQT | 3728 | 103.896 | 0.000 | 0.000 | 0.000 | 0.000 | 0.000 | 16.899 |
| KTINGHDSPHKSAQNLLT | 3729 | 103.332 | 0.000 | 0.000 | 0.256 | 0.194 | 0.000 | 15.722 |
| KTEFTHDSPHKSGQNQQT | 3730 | 102.052 | 0.062 | 0.000 | 0.000 | 0.439 | 0.047 | 12.527 |
| KTINASGSPHSKAINQQT | 3597 | 101.122 | 0.233 | 0.000 | 0.000 | 0.000 | 0.145 | 47.196 |
| KAINGNGSPHKRGQNQQT | 3845 | 100.925 | 0.000 | 0.000 | 0.000 | 0.000 | 0.159 | 10.011 |
| KSEMGHDSPHKSGQNQQT | 3731 | 100.539 | 0.000 | 0.000 | 0.000 | 0.000 | 0.000 | 18.356 |
| KAQQGHDSPHKSGQNQQT | 3732 | 100.395 | 0.000 | 0.000 | 0.000 | 0.000 | 0.057 | 3.954 |
| KTEVMHDSPHKSGQNQQT | 3733 | 99.473 | 0.000 | 0.000 | 0.000 | 0.000 | 0.000 | 12.400 |
| KAINGHDSPHKSGQSLQT | 3734 | 99.310 | 0.058 | 0.000 | 1.439 | 0.254 | 0.056 | 17.323 |
| KTINGSGSPHSKAPNQQH | 3598 | 99.300 | 0.252 | 0.000 | 0.000 | 0.000 | 0.038 | 39.297 |
| KCGEGHDSPHKSGQNQQT | 3735 | 99.298 | 0.000 | 0.000 | 0.000 | 0.000 | 0.000 | 13.147 |
| KTVNGHDSPHKSAQNHQT | 3736 | 99.257 | 0.000 | 0.000 | 0.078 | 0.000 | 0.027 | 17.639 |
| KTVNGHDSPHKSGQTQLT | 3737 | 98.524 | 0.000 | 0.000 | 0.313 | 0.183 | 0.172 | 14.883 |
| KTNNGHDSPHKSGRNRQT | 3738 | 98.307 | 0.000 | 0.000 | 0.124 | 0.000 | 0.037 | 5.840 |
| KTCNEHDSPHKSGQNQQT | 3739 | 97.092 | 0.000 | 0.000 | 0.000 | 0.000 | 0.000 | 8.364 |
| KTINGHDSPHKYGQNEQT | 3740 | 96.960 | 0.000 | 0.000 | 0.000 | 0.000 | 0.000 | 4.613 |
| KASNRHDSPHKSGHNQQT | 3741 | 96.283 | 0.000 | 0.000 | 0.000 | 0.000 | 0.675 | 8.045 |
| KTINGNGSPHSKAPNLQT | 3846 | 95.963 | 0.000 | 0.000 | 0.000 | 0.000 | 0.247 | 36.341 |
| KTETKHDSPHKSGQNQQT | 3742 | 95.121 | 0.000 | 0.000 | 0.000 | 0.000 | 0.083 | 4.831 |
| KSINGHDSPHKSQQNQQT | 3743 | 94.479 | 0.000 | 0.000 | 0.000 | 0.000 | 1.696 | 9.633 |
| KTIGGHDSPHKSGQNQQI | 3744 | 94.420 | 0.000 | 0.000 | 0.000 | 0.000 | 0.333 | 19.324 |
| KTDPQHDSPHKSGQNQQT | 3745 | 93.931 | 0.000 | 0.000 | 0.000 | 0.906 | 0.019 | 11.749 |
| KTINRHDSPHKIVQNQQT | 3746 | 93.409 | 0.000 | 0.000 | 0.000 | 0.000 | 0.000 | 3.064 |
| KTEQYHDSPHKSGQNQQT | 3747 | 93.065 | 0.000 | 0.000 | 0.000 | 0.000 | 0.047 | 15.190 |
| KTINGHDSPHKSVQSKQT | 3748 | 92.445 | 0.000 | 0.000 | 0.078 | 0.000 | 0.047 | 4.263 |
| KELVGHDSPHKSGQNQQT | 3749 | 92.262 | 0.000 | 0.000 | 0.000 | 0.594 | 0.000 | 14.890 |
| KTENRHDSPHKSGQNQQT | 3750 | 91.675 | 0.000 | 0.000 | 0.000 | 0.000 | 0.000 | 13.282 |
| KELMGHDSPHKSGQNQQT | 3751 | 91.191 | 0.000 | 0.000 | 0.000 | 0.000 | 0.000 | 14.032 |
| KTINGNDSPHKIGHNQQT | 3752 | 91.183 | 0.000 | 0.000 | 0.117 | 0.000 | 0.270 | 11.095 |
| KTIKGGGSPHSKAQDQQT | 3847 | 91.172 | 0.000 | 0.000 | 0.000 | 0.064 | 0.085 | 49.580 |
| KTEGHHDSPHKSGQNQQT | 3753 | 89.922 | 0.000 | 0.000 | 0.000 | 0.000 | 0.000 | 23.929 |
| KTEGYHDSPHKSGQNQQT | 3754 | 89.891 | 0.000 | 0.000 | 0.000 | 0.000 | 0.000 | 15.116 |
| KTVNGHDSPHKSGQTQQI | 3755 | 89.801 | 0.000 | 0.000 | 0.657 | 0.000 | 0.542 | 11.543 |
| KTINGQDSPHKSGQNPLT | 3756 | 89.726 | 0.000 | 0.000 | 0.000 | 0.363 | 0.000 | 15.561 |
| KTVNASGSPHSKAQNHQT | 3599 | 89.467 | 0.091 | 0.000 | 0.000 | 0.045 | 0.252 | 39.024 |
| KTINGHDSPHKSGRDQKT | 3757 | 88.871 | 0.000 | 0.000 | 0.000 | 0.350 | 0.181 | 12.117 |
| KTINGHDSPHKSVHNQQN | 3758 | 88.715 | 0.089 | 0.000 | 0.081 | 0.000 | 0.143 | 10.787 |
| KTINGHDSPHKSGQWKRT | 3759 | 88.633 | 0.000 | 0.000 | 0.000 | 0.202 | 0.094 | 5.186 |
| KTIDGSGSPHSKAENRQT | 3600 | 87.993 | 0.092 | 0.000 | 0.000 | 0.139 | 0.054 | 40.629 |
| KNEIGHDSPHKSGQNQQT | 3760 | 87.758 | 0.000 | 0.000 | 0.000 | 0.000 | 0.055 | 14.110 |
| KAINGHDSPHKSGQSQQI | 3761 | 87.585 | 0.000 | 0.000 | 5.310 | 0.000 | 0.000 | 12.864 |
| KIINGHDSPHKSRQAQQT | 3762 | 86.966 | 0.000 | 0.000 | 0.000 | 0.000 | 0.000 | 9.193 |
| KTPNGHDSPHKSGQNQQI | 3763 | 86.683 | 0.000 | 0.000 | 0.000 | 0.000 | 0.109 | 21.278 |
| KITNGHDSPHKSGQTQQT | 3764 | 86.443 | 0.000 | 0.000 | 0.000 | 0.192 | 0.190 | 17.479 |
| KTINGHDSPHKSVQNHQI | 3765 | 86.395 | 0.000 | 0.000 | 0.000 | 0.000 | 0.000 | 9.148 |
| KTINGHDSPHKSKQNQQA | 3766 | 86.265 | 0.000 | 0.000 | 0.000 | 0.123 | 0.041 | 5.768 |
| KTINGHDSPHKSAQNQLN | 3767 | 86.153 | 0.000 | 0.000 | 0.000 | 0.050 | 0.019 | 15.587 |
| KTDITHDSPHKSGQNQQT | 3768 | 85.876 | 0.000 | 0.000 | 0.000 | 0.000 | 0.013 | 9.076 |
| KTVNGHDSPHKSGQTQPT | 3769 | 85.680 | 0.000 | 0.000 | 1.301 | 1.064 | 0.000 | 8.067 |
| KTEKFHDSPHKSGQNQQT | 3770 | 85.358 | 0.000 | 0.000 | 0.000 | 0.000 | 0.026 | 7.229 |
| KTDQGHDSPHKSGQNQQT | 3771 | 85.267 | 0.000 | 0.000 | 0.000 | 0.000 | 0.000 | 16.042 |
| KTINGHDSPHKLWINQQT | 3772 | 85.132 | 0.000 | 0.000 | 1.154 | 0.000 | 0.017 | 12.704 |
| KGINGPDSPHKSGQNQQT | 3773 | 85.080 | 0.000 | 0.000 | 0.084 | 0.000 | 0.054 | 13.750 |
| KSEIGHDSPHKSGQNQQT | 3774 | 84.789 | 0.000 | 0.000 | 0.000 | 0.000 | 0.013 | 15.955 |
| KTINGHDSPHKSVQKQLT | 3775 | 84.351 | 0.000 | 0.000 | 0.000 | 0.038 | 0.103 | 11.890 |
| KTINGHPSPHWKGQNQQT | 3848 | 84.153 | 0.000 | 0.000 | 0.000 | 0.000 | 0.058 | 3.280 |
| KTVNGHDSPHKSGRNQLA | 3776 | 83.858 | 0.000 | 0.000 | 0.000 | 0.000 | 0.132 | 21.252 |
| KTNNVHDSPHKSGQNQQS | 3777 | 83.697 | 0.000 | 0.000 | 0.000 | 0.176 | 0.000 | 7.117 |
| KTIKGSGSPHSKVQDQQT | 3601 | 83.077 | 0.000 | 0.000 | 0.034 | 0.000 | 0.107 | 21.001 |
| KSEKGHDSPHKSGQNQQT | 3778 | 82.982 | 0.000 | 0.000 | 0.000 | 0.000 | 0.105 | 16.662 |
| KWSAGHDSPHKSGQNQQT | 3779 | 82.949 | 0.000 | 0.000 | 0.000 | 0.000 | 0.211 | 12.499 |
| KELAGHDSPHKSGQNQQT | 3780 | 82.876 | 0.000 | 0.000 | 0.000 | 0.000 | 0.093 | 18.063 |
| KTINGHDSPHKMGRNQQS | 3781 | 82.787 | 0.000 | 0.000 | 0.000 | 0.000 | 0.000 | 6.467 |
| KTDQAHDSPHKSGQNQQT | 3782 | 82.402 | 0.000 | 0.000 | 0.141 | 0.000 | 0.000 | 13.397 |
| KTETQHDSPHKSGQNQQT | 3783 | 82.316 | 0.000 | 0.000 | 0.000 | 0.000 | 0.198 | 10.823 |
| KTEMTHDSPHKSGQNQQT | 3784 | 82.221 | 0.000 | 0.000 | 0.000 | 0.000 | 0.000 | 8.431 |
| KTINGHDSPHKSGISIQT | 3785 | 82.019 | 0.000 | 0.000 | 0.000 | 0.191 | 0.044 | 7.310 |
| KTDAVHDSPHKSGQNQQT | 3786 | 81.968 | 0.000 | 0.000 | 0.000 | 0.297 | 0.107 | 13.596 |
| KTSNGHDSPHKSVQNLQT | 3787 | 81.921 | 0.000 | 0.000 | 0.072 | 0.000 | 0.330 | 11.544 |
| KTEKYHDSPHKSGQNQQT | 3788 | 81.637 | 0.000 | 0.000 | 0.000 | 0.000 | 0.013 | 7.580 |
| KQTQGHDSPHKSGQNQQT | 3789 | 81.581 | 0.000 | 0.000 | 0.000 | 0.000 | 0.133 | 15.225 |
| KTINGHDSPHKMAHNQQT | 3790 | 81.329 | 0.000 | 0.000 | 0.000 | 0.000 | 0.094 | 15.949 |
| KAINGSGSPHSKAQTQQA | 3602 | 81.207 | 0.000 | 0.000 | 0.000 | 0.000 | 0.016 | 40.435 |
| KTINGHDSPHKHGQNQQN | 3791 | 81.065 | 0.000 | 0.000 | 0.000 | 0.000 | 0.000 | 4.110 |
| KGADGHDSPHKSGQNQQT | 3792 | 80.981 | 0.000 | 0.000 | 0.000 | 0.000 | 0.074 | 11.423 |
| KVGEGHDSPHKSGQNQQT | 3793 | 80.775 | 0.084 | 0.000 | 0.000 | 0.000 | 0.019 | 16.378 |
| KANEGHDSPHKSGQNQQT | 3794 | 80.470 | 0.000 | 0.000 | 0.000 | 0.000 | 0.000 | 12.818 |
| KTDTMHDSPHKSGQNQQT | 3795 | 80.364 | 0.000 | 0.000 | 0.000 | 0.000 | 0.000 | 13.166 |
| KTEAKSGSPHSKAQNQQT | 3603 | 80.088 | 0.192 | 0.000 | 0.000 | 0.000 | 0.613 | 47.130 |
| KTINGHDSPHKSVQSQQS | 3796 | 80.000 | 0.000 | 0.000 | 0.000 | 1.055 | 0.082 | 17.620 |
| KTIPGSGSPHSKAQNLQT | 3604 | 79.973 | 0.871 | 0.000 | 0.000 | 0.000 | 0.000 | 32.693 |
| KTCIAHDSPHKSGQNQQT | 3797 | 79.857 | 0.000 | 0.000 | 0.066 | 0.000 | 0.093 | 1.930 |
| KTINGHDSPHKSGQTVCT | 3798 | 79.730 | 0.000 | 0.000 | 0.000 | 0.050 | 0.030 | 7.873 |
| KELRGHDSPHKSGQNQQT | 3799 | 79.596 | 0.000 | 0.000 | 0.000 | 0.000 | 0.006 | 22.001 |
| KCQIGHDSPHKSGQNQQT | 3800 | 79.359 | 0.000 | 0.000 | 0.000 | 0.000 | 0.000 | 2.614 |
| KGVMGHDSPHKSGQNQQT | 3801 | 79.170 | 0.000 | 0.000 | 0.000 | 0.138 | 0.086 | 17.287 |
| KACDGHDSPHKSGQNQQT | 3802 | 78.648 | 0.000 | 0.000 | 0.000 | 0.000 | 0.128 | 17.767 |
| KTINGQDSPHKSGQYQQI | 3803 | 78.585 | 0.000 | 0.000 | 0.000 | 0.286 | 0.672 | 5.664 |
| KTINGHDSPHKSGQQIMT | 3804 | 78.534 | 0.000 | 0.000 | 0.000 | 0.000 | 0.058 | 7.067 |
| KTINGHDSPHKSRQNEQS | 3805 | 78.534 | 0.000 | 0.000 | 0.000 | 0.112 | 0.188 | 13.388 |
| KASNGHDSPHKSGLNHQT | 3806 | 78.451 | 0.000 | 0.000 | 0.000 | 0.000 | 0.000 | 17.975 |
| KTVNGHDSPHKSGQSQPT | 3807 | 78.309 | 0.000 | 0.000 | 0.000 | 0.000 | 0.231 | 10.627 |
| KNELGHDSPHKSGQNQQT | 3808 | 78.135 | 0.000 | 0.000 | 0.000 | 0.000 | 0.182 | 17.457 |
| KTETFHDSPHKSGQNQQT | 3809 | 78.070 | 0.000 | 0.000 | 0.000 | 0.782 | 0.007 | 4.693 |
| KAAEGHDSPHKSGQNQQT | 3810 | 77.793 | 0.000 | 0.000 | 0.000 | 0.000 | 0.060 | 13.552 |
| KGQNGHDSPHKSGQNQQT | 3811 | 77.770 | 0.000 | 0.000 | 0.000 | 0.107 | 0.056 | 13.618 |
| KNEFGHDSPHKSGQNQQT | 3812 | 77.740 | 0.000 | 0.000 | 0.000 | 0.000 | 0.029 | 16.318 |
| KTSIGYDSPHKSGQNQQT | 3813 | 77.730 | 0.000 | 0.000 | 0.000 | 0.057 | 0.178 | 4.831 |
| KTDNGHDSPHKSGQNLQT | 3814 | 77.565 | 0.504 | 0.000 | 0.000 | 0.000 | 0.000 | 16.184 |
| KTEGQHDSPHKSGQNQQT | 3815 | 77.423 | 0.000 | 0.000 | 0.000 | 0.000 | 0.748 | 20.310 |
| KTITGHDSPHKSRQDQQT | 3816 | 77.127 | 0.000 | 0.000 | 0.000 | 0.000 | 0.000 | 6.250 |
| KAEHGHDSPHKSGQNQQT | 3817 | 77.026 | 0.000 | 0.000 | 0.000 | 0.000 | 0.017 | 20.937 |
| KTINGDDSPHKSGQKQLT | 3818 | 76.968 | 0.000 | 0.000 | 0.000 | 0.163 | 0.014 | 15.820 |
| KCDQGHDSPHKSGQNQQT | 3819 | 76.887 | 0.000 | 0.000 | 0.000 | 0.193 | 0.013 | 27.317 |
| KEILGHDSPHKSGQNQQT | 3820 | 76.770 | 0.000 | 0.000 | 0.000 | 0.804 | 0.009 | 10.771 |
| KTIHGSGSPHSKAQNQAT | 3605 | 76.765 | 0.000 | 0.000 | 0.000 | 0.000 | 0.215 | 43.969 |
| KTERNHDSPHKSGQNQQT | 3821 | 76.751 | 0.000 | 0.000 | 0.000 | 0.000 | 0.000 | 14.979 |
| KAINGDDSPHKSGHNQQT | 3822 | 76.578 | 0.000 | 0.000 | 0.000 | 0.032 | 0.059 | 17.755 |
| KTSNGHNSPHKSGQNQET | 3823 | 76.515 | 0.000 | 0.000 | 0.000 | 0.000 | 0.000 | 4.764 |
| KTINGHDSPHKSGQMIHT | 3824 | 76.364 | 0.000 | 0.000 | 0.000 | 0.000 | 0.000 | 9.486 |
| KNAIGHDSPHKSGQNQQT | 3825 | 76.289 | 0.000 | 0.000 | 0.000 | 0.009 | 0.072 | 15.178 |
| KTDKFHDSPHKSGQNQQT | 3826 | 76.204 | 0.000 | 0.000 | 0.000 | 0.000 | 0.000 | 7.096 |
| KTEGFHDSPHKSGQNQQT | 3827 | 76.191 | 0.000 | 0.000 | 0.000 | 0.000 | 0.080 | 13.163 |
| KVINGHDSPHKSGRNHQS | 3828 | 75.961 | 0.000 | 0.000 | 0.000 | 0.000 | 0.000 | 13.568 |
| KTITGHDSPHKSVQNRQT | 3829 | 75.940 | 0.000 | 0.000 | 0.000 | 0.621 | 0.000 | 4.310 |
| KTPDMHDSPHKSGQNQQT | 3830 | 75.871 | 0.659 | 0.000 | 0.000 | 0.000 | 0.048 | 11.277 |
| KTINGHDSPHKSGQKMNT | 3831 | 75.820 | 0.000 | 0.000 | 0.000 | 0.000 | 0.167 | 6.373 |
| KTELQHDSPHKSGQNQQT | 3832 | 75.814 | 0.000 | 0.000 | 0.000 | 0.105 | 0.000 | 11.798 |
| KTIHGHDSPHKSGQSQQN | 3833 | 75.777 | 0.000 | 0.000 | 0.059 | 0.000 | 0.166 | 7.426 |
| KTEIGHDSPHKSGQNQQT | 3834 | 75.525 | 0.000 | 0.000 | 0.016 | 0.012 | 0.000 | 9.593 |
| KTINGHDSPHKSGQYQHA | 3835 | 75.308 | 0.000 | 0.000 | 0.000 | 0.000 | 0.017 | 17.081 |
| KTELYHDSPHKSGQNQQT | 3836 | 75.235 | 0.000 | 0.000 | 0.000 | 0.000 | 0.042 | 10.354 |

[1461] Additional variants were identified following generation and screening in NHPs that had the following properties. TTM-001 and TTM-002 capsid variants comprising the amino acid sequence of SEQ ID NOs: 4253, 4281, 429N0-4295, 4304, 4305, 4320, 4328-4335.4337-43.0, 4353, 4355, 4369, 4387, 4421, 4424-4428, 4430, 4432, 4433, 4435, 4436-4449, 4452, 4455, 4476, 4483, or 4484 had a raw virus count 10 or greater, a CV of less than 1 for the brain samples isolated from the NHPs, demonstrated a 50-fold or greater increase in expression in the brain of mice and NHPs relative to AAV9, and demonstrated 2-fold or less expression in the liver and DRG of NHPs relative to AAV9. TTM-001 and TTM-002 capsid variants comprising the amino acid sequence of SEQ ID NOs: 4098-4105, 4254-4280, 4282-4289, 4296-4303, 4306-4327, 4336, 4341-4352, 4354, 4356-4420, 4422, 4423, 4425, 4429, 4431, 4434, 4444, 4450, 4451, 4453, 4454, 4456-4475, 4477-4482, or 4485 had a CV of less than 1 in across the brain samples isolated from the NHPs and demonstrated a 100-fold or greater increase in expression in the brain of NHPs relative to AAV9. TIM-001 and TTM-002 capsid variants comprising the amino acid sequence of SEQ ID NOs: 4102 and 4106-4252 had normalized virus counts of greater than or equal to 0.01, a CV of less than 1 across the liver RNA samples isolated from the NHPs, and demonstrated a 20-fold or greater increase in expression in the liver of NHPs relative to AAV9. TM-001 and TTM-002 capsid variants comprising the amino acid sequence of SEQ ID NO: 4105 had a raw virus count 9.9 or greater, a CV of less than 1 across the muscle samples isolated from the NHPs, and 5-fold or greater increase in expression in the muscle of the NHPs relative to AAV9. TM-001 and TTM-002 capsid variants comprising the amino acid sequence of SEQ ID NO: 4105 also had a raw virus count 9.9 or greater, a CV of less than 1 across the samples isolated from the heart of the NHPs, and 5-fold or greater increase in expression in the heart of the NHPs relative to AAV9.

[1462] These additional matured variants were then incorporated into a synthetic library that was passaged through another NHP or mouse along with the TTM-002 capsid variant, the TTM-001 capsid variant, and an AAV9 capsid as controls. Following this passage, CNS and peripheral tissues were collected and RNA was extracted. Following RNA recovery and RT-PCR amplification, a systematic NGS enrichment analysis was performed to calculate the fold enrichment ratio relative to the AAV9 wild-type control or the TTM-002 capsid variant control. The matured capsid variants were filtered first by capsid fitness (virus counts/DNA counts), selecting those samples that had a fitness threshold greater than or equal to 0.75. Following this initial selection, brain tropic and heart tropic matured capsid variants were selected. For brain tropic capsid variants with little to no expression in the liver (liver de-targeted) or heart, the matured capsid variants were further filtered based on a CV of less than 0.5 across the brain RNA samples isolated from the NHPs, a fold-change in DNA expression in the liver of the NHPs of less than 0.2 relative to the AAV9 wild-type control, a ratio of brain RNA to liver DNA in NHPs of at least 100, at least 2.5 or 3 fold-enrichment or greater relative to the TTM-002 control in the brain of the NHPs, at least 0.8 fold-enrichment or greater in the brain of mice relative to the TTM-002 control, and an average fold-change in expression of RNA in the heart relative to the AAV9 control of less than 1.5. The resulting brain tropic matured capsid variants that lead to increased expression in the brain of mice and NHPs comprised the amino acid sequences of SEQ ID NOs: 3272, 3274, 3421, 3487, 3589, and 4478, many of which comprised an E at position 451 numbered according to SEQ ID NOs: 138, 981, or 982 (or the third position numbered according to SEQ ID NOs: 3272, 3274, 3421, 3487, 3589, and 4478), and either an N or a positively charged residue (e.g., K or R) at position 452 numbered according to SEQ ID NO: 138, 981, or 982 (or the fourth position numbered according to SEQ ID NOs: 3272, 3274, 3421, 3487, 3589, and 4478). For heart tropic capsids, the capsid variants were further filtered based on a CV of less than 0.5 across the heart RNA samples isolated from the NHPs, a fold-change in DNA expression in the liver of the NHPs of less than 0.5 relative to the AAV9 wild-type control, and a fold-change in RNA expression of less than 1.5 in the brain of NHPs relative to the TTM-002 control. The resulting heart tropic matured capsid variants comprised the amino sequence of SEQ ID NOs: 3382 and 4406. The data and sequences for the selected brain and heart tropic capsid variants that met the filtering criteria are provided in Table 75. These brain and heart tropic matured capsid variants also demonstrated decreased tropism in the DRG.

TABLE 75
NGS fold-enrichment of TTM-001 and TTM-002 matured AAV capsid variants with
increased expression in the brain or heart of NHPs and mice

| | | Average | | | | | | |
|---|---|---|---|---|---|---|---|---|
| | | Fold | | | | | | |
| | | Enrichment | | | | | | |
| | | relative | | | | | | |
| | | to TTM-002 | Average Fold Enrichment relative to AAV9 | | | | | |
| | | Brain | Brain | Spinal | Liver | Heart | Muscle | Brain |
| | SEQ | RNA | RNA | Cord | DNA | RNA | DNA | RNA |
| Sequence | ID NO | (NHP) | (NHP) | (NHP) | (NHP) | (NHP) | (NHP) | (Mouse) |
| KTENVSGSPHSKAQNQQT | 3272 | 7.333 | 35.140 | 12.982 | 0.088 | 1.242 | 2.077 | 8.619 |
| KTEKVSGSPHSKAQNQQT | 3274 | 6.203 | 29.725 | 3.103 | 0.138 | 1.165 | 0.855 | 6.073 |
| KTERVSGSPHSKAQNQQT | 3589 | 4.147 | 19.870 | 4.171 | 0.123 | 0.872 | 5.141 | 6.080 |
| KNSIGSGSPHSKAQNQQT | 3421 | 3.582 | 17.164 | 3.080 | 0.137 | 0.798 | 0.772 | 7.657 |
| KTVNGHDSPHKSGQRPST | 4478 | 2.890 | 13.848 | 5.763 | 0.110 | 0.551 | 4.544 | 6.833 |
| KAENGSGSPHSKAQNQQT | 3487 | 2.627 | 12.588 | 3.183 | 0.079 | 0.526 | 1.945 | 7.571 |
| KTSNASGSPHSKAHNQQT | 3382 | 1.419 | 6.799 | 8.066 | 0.352 | 6.641 | 7.517 | 8.203 |
| KTINGSGSPHKSGQNKTS | 4406 | 0.550 | 2.637 | 0.655 | 0.317 | 7.899 | 12.738 | 1.932 |
| KTINGSGSPHSKAQNQQT | 7411 | 1.297 | 6.216 | 5.338 | 0.456 | 3.062 | 4.732 | 5.964 |
| KTINGHDSPHKSGQNQQT | 7579 | 1.000 | 4.792 | 2.504 | 0.181 | 2.456 | 4.591 | 7.103 |

[1463] These data demonstrate that following two maturation approaches, matured TTM-001 and TTM-002 capsid variants (AAV9 capsid variants) with loop IV modifications were generated with significantly enhanced CNS tropism over wild-type AAV9 controls in both NHPs and mice, while also exhibiting de-targeting in peripheral tissues (e.g., the liver and DRG). These resulting matured variants therefore demonstrated cross-species CNS tropism in both NHPs and mice.

### Example 13. Evaluation of TTM-001 and TTM-002 AAV Capsid Variants in Diverse Primate Species

[1464] This Example evaluates the tropism and cross-species compatibility of the TTM-001 (SEQ ID NO: 981 (amino acid) and 983 (DNA), comprising SEQ ID NO: 941) and TTM-002 (SEQ ID NO: 982 (amino acid) and 984 (DNA), comprising SEQ ID NO: 2) capsid variants in two diverse primate species, marmosets (Callithrix jacchus) and African green monkeys (Chlorocebus sabaeus), as compared to their tropism in cynomolgus macaques (Macaca fascicularis) provided in Example 10. The cross-species compatibility and tropism of an AAV9 capsid variant comprising the amino acid sequence of SPHKYG (SEQ ID NO: 966) was also investigated in this example. The amino acid and DNA sequences of TTM-001 and TTM-002 are provided, e.g., in Tables 4 and 5, respectively.

[1465] To investigate tropism in African green monkeys, AAV particles comprising the TTM-001 capsid variant, the TTM-002 capsid variant, an AAV9 capsid variant comprising SEQ ID NO: 966, or an AAV9 control under the control of a synapsin promoter, were intravenously injected into NHPs (n=2, 3-12 years of age) at a dose of 2E13 vg/kg. After 14-days in life, the brains and tissues (liver, DRG, quadriceps, and heart) of the NHPs were collected and RNA was extracted. Following RNA recovery and RT-PCR amplification, a systematic NGS enrichment analysis was performed to calculate the fold enrichment ratio relative to the AAV9 wild-type control.

[1466] To investigate tropism in marmoset monkeys, AAV particles comprising the TTM-001 capsid variant, the TTM-002 capsid variant, an AAV9 capsid variant comprising SEQ ID NO: 966, or an AAV9 control, were intravenously injected into NHPs (n=2, >10 months of age) at a dose of 2E13 vg/kg (8.75E12 vg/mL). After 28-days in life, the brains and tissues (liver quadriceps, and heart) of the NHPs were collected and RNA was extracted. Following RNA recovery and RT-PCR amplification, a systematic NGS enrichment analysis was performed to calculate the fold enrichment ratio relative to the AAV9 wild-type control.

[1467] As provided in Table 63 (African green monkeys) and Table 64 (marmosets), both the TTM-001 and TTM-002 capsid variants demonstrated increased CNS tropism in diverse primate species. The TTM-001 capsid variant demonstrated a 73.6-fold increase in expression relative to AAV9 in the brain of cynomolgus macaques (Table 9, Example 10), a 43.5-fold increase in expression relative to AAV9 in the brain of African green monkeys, and a 703.3-fold increase in expression relative to AAV9 in the brain of marmosets. The TTM-002 capsid variant demonstrated a 62.6-fold increase in expression relative to AAV9 in the brain of cynomolgus macaques (Table 9), a 13.8-fold increase in expression relative to AAV9 in the brain of African green monkeys, and a 366.6-fold increase in expression relative to AAV9 in the brain of marmosets. Both TTM-001 and TTM-002 led to a significant increase in expression relative to AAV9 in the heart of both African green monkeys and marmosets (Table 63 and Table 64). The AAV9 capsid variant comprising SEQ ID NO: 963 also demonstrated in increase in expression relative to AAV9 in the brain and heart of both African green monkeys and marmosets. Furthermore, TTM-001, TTM-002, and the AAV9 capsid variant comprising SEQ ID NO: 966, also all led to increased expression in the brain of both BALB/c and C57Bl/6 mice (Table 11, Example 10), demonstrating an average fold change in expression relative to AAV9 across both species of mice of 63.1, 66.8, and 126.97, respectively.

TABLE 63
NGS-Fold Enrichment of TTM-001 (comprises SEQ ID NO: 941),
TTM-002 (comprises SEQ ID NO: 2), and an AAV9 capsid variant
comprising SEQ ID NO: 966 in African green monkeys

| | SEQ ID | Fold Enrichment relative to AAV9 | | | | | |
|---|---|---|---|---|---|---|---|
| Sequence | NO: | Brain | DRG | Heart | Liver DNA | Liver RNA | Muscle |
| SPHSKA | 941 | 43.525 | 1.010 | 184.789 | 0.242 | 1.547 | 1.715 |
| HDSPHK | 2 | 13.779 | 0.678 | 35.991 | 0.084 | 0.087 | 0.144 |
| SPHKYG | 966 | 9.805 | 0.071 | 44.865 | 0.085 | 0.136 | 0.234 |

TABLE 64
NGS-Fold Enrichment of TTM-001 (comprises SEQ ID NO: 941),
TTM-002 (comprises SEQ ID NO: 2), and an AAV9 capsid variant
comprising SEQ ID NO: 966 in Marmosets

| | SEQ ID | Fold Enrichment relative to AAV9 | | | | |
|---|---|---|---|---|---|---|
| Sequence | NO: | Brain | Heart | Liver DNA | Liver RNA | Muscle |
| SPHSKA | 941 | 703.610 | 48.979 | 0.268 | 0.779 | 0.425 |
| HDSPHK | 2 | 366.625 | 18.572 | 0.075 | 0.276 | 0.229 |
| SPHKYG | 966 | 150.209 | 17.232 | 0.045 | 0.014 | 0.146 |

[1468] Taken together, these data demonstrate that the AAV9 capsid variants of TTM-001 and TTM-002 demonstrated increased CNS tropism relative to the AAV9 control in the CNS across three diverse primate species and two species of mice, providing evidence of strong cross-species capacity. The AAV9 capsid variant comprising the amino acid sequence of SEQ ID NO: 966 also demonstrated strong CNS expression relative to the AAV9 control in two species of NHPs and two species of mice, also showing strong cross-species capacity.

### Example 14. Advanced Maturation of TTM-002 Capsid Variant in Mice

[1469] This Example describes additional maturation of the TTM-002 (SEQ ID NO: 982 (amino acid) and 984 (DNA), comprising SEQ ID NO: 2) capsid variant in mice. In order to mature the TTM-002 capsid variant, sets of three contiguous amino acids were randomized across the mutagenesis region in TTM-002 sequence, which spanned from position 450 to position 466, numbered according to SEQ ID NO: 982. Unlike the maturation performed in in Example 12, where the SPH motif that was observed in the AAV capsid variants that demonstrated the greatest fold-enrichment in the NHP brain relative wild-type AAV9 was not disrupted, in the maturation approach used in this Example, the SPH motif was not held constant to further explore the role of this motif in the capsid variant. The matured TTM-002 capsid variants that resulted from the maturation approach were pooled together for subsequent testing and characterization in mice.

[1470] The library of matured AAV capsid variants generated from the TTM-002 matured AAV capsid variant were intravenously injected into the tail vein of three CD-1 Outbred mice (Charles River; 6-8 weeks of age) at a dose of 1.0×10¹² VG/dose. After about 28 days in life, the brains of the mice were isolated and RNA was extracted. Following RNA recovery and RT-PCR amplification, a systematic NGS enrichment analysis was performed to calculate the fold enrichment ratio relative to the corresponding TTM-002 non-matured control, and the peptides comprised within the variants were identified. Variants were filtered by those with a raw virus count in the sample above 10 and a coefficient of variance (CV) that was greater than 1 (identifies the peptides/variants reliably detected in the majority of the samples isolated from the three mice).

[1471] Following the advanced maturation screen and filtering of the variants, 1302 variants demonstrated an increase in expression relative to the non-matured TTM-002 capsid variant in the brain of the outbred mice. Of the 1302 variants with improved tropism relative to the non-matured TTM-002, 1283 comprised the SPH motif in the same position as the non-matured TTM-002 capsid variant (e.g., immediately subsequent to position 455, relative to a reference sequence numbered according to the amino acid sequence of SEQ ID NO: 138 or 982). Mutations in the region of the SPH motif present in the non-matured TTM-002 capsid variant only consistently appear in those variants with a fold change of 0.2 or 0.1 or lower relative to the non-matured TTM-002 control in the brain of the mice. This indicates that the SPH motif may be important to the increased brain tropism that observed for the TTM-002 capsid variant. In instances when the SPH motif was disrupted, the fold change of the matured variants of TTM-002 decreased considerably in relation to the non-matured TTM-002 variant which comprised the SPH motif.

### Example 15. Tropism of TTM-002 AAV Capsid Variant

[1472] This Example further investigates the tropism and CNS cells transduced by the TTM-002 capsid variant (SEQ ID NO: 982 (amino acid) and 984 (DNA), comprising SEQ ID NO: 2), as outlined in Table 3 above. The amino acid and DNA sequences of TTM-002 are provided, e.g., in Tables 4 and 5, respectively.

[1473] AAV particles were generated with the TTM-002 capsid variant encapsulating a GFP transgene (AAV_TTM-002.GFP) or the HER-53 genetic element (SEQ ID NO: 5168) (AAV_TTM-002.HER-53).

[1474] Two tandem single cell RNA sequencing runs (scRNA-Seq) of mouse cells derived from the midbrain area were performed. In the first run, cells were pooled from two mice at day 28 post treatment with AAV_TTM-002.HER-53 particles. In the second run we treated with AAV_TTM-002.GFP particles, in the same manner but without xenografts. Orthotopic xenografts of MDA-MB-361-Luc #1 high passage cells grown as tumorspheres (in tumorsphere media; Sigma #C-28070) were injected (250,000 cells/2 μL/mouse) intracranially into 2-month old female SCID CB17 (Mutation: Icr-Prkdcscid/IcrIcoCrl) congenic immunodeficient mice (Charles River Laboratories). The injections were 2.5 mm (lateral), −1 mm (posterior) with respect to bregma, lowered −3 mm ventral and raised +0.5 mm dorsal to a final −2.5 mm ventral position. Two days later, dilutions of the AAV_TTM-002.HER-53 particles (run 1), or in the case without xenografts, dilutions of AAV_TTM-002.GFP particles (run 2) were prepared. IV injections of 100 μL (2.5e11 VG/animal) of the AAV_TTM-002.HER-53 particles or AAV_TTM-002.GFP particles were administered through the tail veins of mice (n=5 mice per groups). At 7 days post-injection, mice from run 1 were imaged in an AmiHTX (Spectral Imager) for bioluminescence of the human tumor cells due to expression of luciferase in response to intraperitoneal luciferin injections.

[1475] At 28 days post-injection with the AAV_TTM-002.HER-53 particles or AAV_TTM-002.GFP particles, two mice from each run were necropsied, brain samples were isolated, and the midbrain was dissected and isolated. The midbrain samples were then exposed to a cold protease inhibitor (Creative Biomart #NATE-0633) and were dissociated at 6 degrees centigrade. For the samples collected from the mice of run 1 (AAV_TTM-002.Payload particles), myelin depletion was performed (Miltenyi, #130-096-731), cells were filtered through a 40 μM mesh to filter out neurons) and loaded on a 10× chromium G chip. scRNA-Seq was performed (10× Genomics) and samples were sequenced on a NextGen500 Sequencing machine (Illumina). For the samples collected from run 2 (AAV_TTM-002.GFP particles and no xenografts), the cells were not myelin depleted or filtered through 40 μM mesh to include neurons. The cells isolated after run 2 were FACS sorted for GFP+/7AAD-(live GFP+ cells). The resultant cells were loaded on a 10× chromium G chip and the scRNA-Seq was run and processed (10× Genomics).

[1476] For run 1, the scRNA-Seq data was filtered to include cells with only greater than 1000 genes per cell and less than 5000, and less than 20 percent mitochondrial gene expression. For run 2, the scRNA-Seq data was filtered to include cells with only greater than 200 genes per cell and less than 5000, and less than 20 percent mitochondrial gene expression. The data were normalized, scaled, and integrated into one combined dataset. Clusters were generated with a resolution of 0.3 and each cluster identity was determined using a panel of cell type specific genes (e.g., as described in Brown et al., 2021. “Deep Parallel Characterization of AAV Tropism and AAV-Mediated Transcriptional Changes via Single-Cell RNA Sequencing”. Front. Immunol. 12:730825; the contents of which are hereby incorporated by reference in its entirety). The percentage of GFP sorted cells per cluster was calculated as was the percentage of payload expressing genes per cluster as parallel measures of TTM-002 transduction.

[1477] For HER-53 expressing cells, endothelial cells had the highest proportion of HER-53 positive cells, followed by astrocytes (Table 65). For GFP+ sorted cells, endothelial cells had the highest proportion of GFP positive cells, and astrocytes were the third highest cell type when sorting by proportion of cells expressing GFP (Table 65). These data indicate TTM-002 transduction exhibits an endothelial and astrocytic tropism. Furthermore, the astrocytic cluster had the second highest level of expression of Olig2 (oligodendrocytes demonstrated the greatest Olig2 expression). IHC staining was performed on brain samples isolated from AAV_TTM-002.GFP infected mice and demonstrated that GFP co-localized with some but not all Olig2+ cells. No co-staining was observed with mylein basic protein (MBP), a marker of oligodendrocytes. Co-staining with GFP was also not observed in NeuN positive cells (neurons), GFAP positive cells (astrocytes), and Iba1 positive cells (microglia). GFP staining was observed throughout the sagittal section of the mouse brain, which was demonstrative of increased staining in the midbrain. The GFP expressing cells observed did not have a bipolar morphology like oligodendrocyte progenitor (OPC) cells and therefore, together with the scRNA-Seq data, these results indicated that at day 28 post AAV treatment, Olig2+ astrocytes in the midbrain are being transduced by AAV particles comprising a TTM-002 capsid, in a cell type specific tropism.

TABLE 65
Quantification of HER-53 positive cells and GFP positive cells

| Cluster | % HER-53 | Cluster | % GFP Cells/ |
|---|---|---|---|
| Identity | Cells/Cluster | Identity | Cluster |
| Endothelial-2 | 6.58 | Endothelial-2 | 6.58 |
| Astrocyte | 4.50 | Endothelial-1 | 3.45 |
| Pericytes | 4.23 | Ventrolateral and | 2.38 |
| | | leptomeningeal | |
| | | cells (VLM) | |
| Mature Oligos | 3.85 | Astrocyte | 2.37 |
| Endothelial-1 | 3.09 | Vascular | 1.03 |
| | | smooth muscle | |
| | | cells (VSC) | |
| Committed Oligos | 1.90 | Pericytes | 0.77 |
| Vascular | 1.72 | Microglia | 0.00 |
| smooth muscle | | | |
| cells (VSC) | | | |
| Microglia | 0.40 | Committed Oligos | 0.00 |
| Macrophages | 0.00 | Macrophages | 0.00 |
| Ventrolateral and | 0.00 | Oligodendrocytes | 0.00 |
| leptomeningeal | | | |
| cells (VLM) | | | |
| Oligodendrocytes | 0.00 | Committed Oligos-2 | 0.00 |
| Committed Oligos-2 | 0.00 | Mature Oligos | 0.00 |

### Example 16. Prophylactic Treatment of HER-75 Vectorized in TTM-002 Capsid Variant

[1478] This example investigated prophylactic treatment in mice following intravenous administration of AAV particles comprising the TTM-002 capsid variant (SEQ ID NO: 982 (amino acid) and 984 (DNA), comprising SEQ ID NO: 2) encapsulating a HER-75 genetic element (SEQ ID NO: 5190, with an Fc region comprising the following substitutions L235V, F243L, R292P, Y300L, and P396L, numbered according to the EU index as in Kabat) (AAV_TTM-002.HER-75) as compared to treatment with AAV particles comprising the TTM-002 capsid variant encapsulating a genetic element encoding an IgG1 control with the modified Fc region of HER-75 (comprising the following substitutions L235V, F243L, R292P, Y300L, and P396L, numbered according to the EU index as in Kabat) (AAV_TTM-002.Control). Dilutions of the AAV_TTM-002.HER-75 or AAV_TTM-002. Control particles were prepared and intravenous injections of 100 μL (2.5e11 VG/animal) were administered through the tail veins of female mice, (n=5 mice per cohort; Fox Chase SCID CB17 Mutation: Icr-Prkdcscid/IcrIcoCrl Congenic Immunodeficient from Charles River Laboratories (#3611); 75 days old). Ten days post-administration of the AAV particles, orthotopic xenografts of MDA-MB-361-Luc #1 passage #43 cells grown as tumorspheres (in tumorsphere media; Sigma #C-28070) were injected intracranially (250,000 cells/2 μL/mouse). The injections were 2.5 mm (lateral), −1 mm (posterior) with respect to bregma, lowered −3 mm ventral and raised +0.5 mm dorsal to a final −2.5 mm ventral position. Starting at day 7 post-injection of the xenograft until 48 days post-xenograft, mice were imaged weekly in an AmiHTX (Spectral Imager) for bioluminescence of the human tumor cells expression of luciferase in response to intraperitoneal luciferin injections.

[1479] Prophylactic treatment 10 days prior to xenograft with IV administration of AAV_TTM-002.HER-75 (dosed at 2.5e11 VG/mouse) demonstrated persistent and significant attenuation of tumor growth as compared to isotype control (hIgG1) treated mice (FIG. 20A). FIG. 20B shows the comparison of the levels of antibodies produced following administration of the AAV_TTM-002 particles encapsulating the genetic element encoding an isotype control antibody to the AAV_TTM-002 particles encapsulating the genetic element encoding HER-75 in the in the CSF, as measured by alphaLISA. By alphaLISA, CSF levels were found to be above the minimum effective dose of −140 ng/ml as determined by the IC50 of HER-53 in MDA-MB-361 cell proliferation assay. FIG. 20C shows the comparison of viral genome copies/diploid cell produced following administration of the AAV_TTM-002 particles encapsulating the genetic element encoding an isotype control antibody to the AAV_TTM-002 particles encapsulating the genetic element encoding HER-75 in the brain. Viral genome levels in the brain were comparable in mice treated prophylactically with AAV particles comprising the TTM-002 capsid variant encoding the isotype control (4.8 VGs/diploid cell) and AAV particles comprising the TTM-002 capsid variant encoding the HER-75 genetic element (4.5 VGs/diploid cell) (FIG. 20C). Additionally, the mice treated prophylactically with the AAV particles comprising the TTM-002 capsid variant encoding the HER-75 genetic element had a median survival of 130 days, compared to a median survival of 102 days in the mice treated prophylactically with the AAV particles comprising the TTM-002 capsid variant encoding the isotype control. Thus, prophylactic treatment with AAV particles comprising the TTM-002 capsid variant encoding the HER-75 genetic element led to a 27.5% increase in survival.

### Example 17. Individual Capsid Characterization of TTM-002 in NHPs

[1480] This example describes the transduction level, tropism, ability to cross the blood brain barrier, and overall spatial distribution in the central nervous system (CNS) and peripheral tissues of the AAV capsid variant TTM-002 (SEQ ID NO: 982 (amino acid) and 984 (DNA), comprising SEQ ID NO: 2) and TTM-001 (SEQ ID NO: 981 (amino acid) and 983 (DNA), comprising SEQ ID NO: 941), relative to AAV9 following intravenous administration in African green monkeys (Chlorocebus sabaeus) and marmosets (Callithrix jacchus).

A. Evaluation of TTM-002 in African Green Monkeys (Chlorocebus sabaeus)

[1481] AAV particles were generated with the TTM-002 capsid variant or the AAV9 capsid control which comprised a self-complementary viral genome encoding an histone H2b protein with an HA tag driven by a ubiquitous CBA promoter. The AAV particles comprising the TTM-002 capsid variant or the AAV9 capsid control were administered to the African green monkeys (Chlorocebus sabaeus) (n=2) intravenously at a dose of 1e12 VG/kg or 1e13 VG/kg. The in-life period was 28 days and then various CNS and peripheral tissues were collected for measuring transgene mRNA (expression) by RT-qPCR and viral DNA (biodistribution) by ddPCR.

[1482] As shown in Table 70, the TTM-002 capsid variant resulted in increased brain biodistribution in all brain regions investigated as compared to AAV9 at both doses tested. The TTM-002 capsid variant also led to increased transgene expression in the brain relative to AAV9 at both doses tested (Table 71). In the spinal cord, the TTM-002 capsid variant distributed to the cervical spinal cord and the spinal cord ventral horn at a higher level relative to AAV9 (Table 70) and it mediated higher transgene expression than AAV9 in both the full spinal cord and the ventral horn (Table 71). The TTM-002 capsid variant exhibited lower biodistribution (Table 70) and transgene expression (Table 71) in the DRG relative to AAV9, indicating that TTM-002 capsid variant was detargeted in the DRG relative to AAV9. Similar expression and distribution were observed by immunohistochemistry performed on these CNS tissues.

[1483] Distribution and transgene expression was also measured in the peripheral tissues of the liver, heart, and quadriceps. In the liver, TTM-002 capsid variant exhibited lower biodistribution (Table 70) and transgene expression (Table 71) relative to AAV9, indicating that TTM-002 capsid variant was detargeted in the liver relative to AAV9. In the heart, the TTM-002 capsid variant exhibited comparable levels of biodistribution relative to AAV9 (Table 70), but increased transgene expression relative to AAV9 (Table 71). In the quadriceps, TTM-002 capsid variant exhibited lower biodistribution (Table 70) and lower transgene expression (Table 71), relative to AAV9. Similar expression and distribution were observed by immunohistochemistry performed on these peripheral tissues.

TABLE 70
Quantification of viral genome copies per diploid genome (biodistribution) by ddPCR
following intravenous administration of AAV particles comprising a TTM-002 capsid

| | 1e12 VG/kg | | | 1e13 VG/kg | | |
|---|---|---|---|---|---|---|
| | AAV9 | TTM-002 | | AAV9 | TTM-002 | |
| | (VG copies/ | (VG copies/ | TTM-002 | (VG copies/ | (VG copies/ | TTM-002 |
| | diploid | diploid | relative to | diploid | diploid | relative to |
| Tissue | genome) | genome) | AAV9 | genome) | genome) | AAV9 |
| Putamen | 0.03 | 0.37 | 12.3 | 0.26 | 2.4 | 9.2 |
| Caudate | 0.02 | 0.58 | 29 | 0.14 | 2.1 | 14.7 |
| Thalamus | 0.06 | 0.21 | 3.5 | 0.25 | 1.0 | 4 |
| Hippocampus | 0.03 | 0.29 | 9.7 | 0.16 | 1.56 | 9.8 |
| Substantia | 0.05 | 0.34 | 6.8 | 0.37 | 1.38 | 3.7 |
| Nigra | | | | | | |
| Motor Cortex | 0.03 | 0.56 | 19 | 0.27 | 2.4 | 8.9 |
| Frontal Cortex | 0.04 | 0.67 | 17 | 0.20 | 3.6 | 18 |
| Temporal | 0.03 | 0.31 | 10 | 0.11 | 2.67 | 24 |
| Cortex | | | | | | |
| Cerebral | 0.008 | 0.08 | 10 | 0.03 | 0.16 | 5.3 |
| Cortex | | | | | | |
| Dentate | 0.06 | 0.10 | 1.7 | 0.32 | 3.21 | 10 |
| Nucleus | | | | | | |
| Cervical | 0.03 | 0.12 | 4 | 0.19 | 0.91 | 4.8 |
| Spinal Cord | | | | | | |
| Thoracic | 0.04 | 0.03 | 0.75 | 0.36 | 0.38 | 1.1 |
| Spinal Cord | | | | | | |
| Lumbar Spinal | 0.04 | 0.03 | 0.75 | 0.29 | 0.37 | 1.3 |
| Cord | | | | | | |
| C5 Ventral | 0.04 | 0.25 | 6.3 | 0.29 | 2.2 | 7.6 |
| Horn | | | | | | |
| L5 Ventral | 0.06 | 0.28 | 4.7 | 0.31 | 1.9 | 6.1 |
| Horn | | | | | | |
| Cervical DRG | 0.07 | 0.01 | −7 | 0.81 | 0.36 | −2.3 |
| Thoracic DRG | 0.06 | 0.01 | −6 | 1.31 | 0.43 | −3 |
| Lumbar DRG | 0.07 | 0.01 | −7 | 1.31 | 0.57 | −2.3 |
| Liver | 9.5 | 1.2 | −7.9 | 127 | 7.7 | −16.5 |
| Heart | 0.6 | 0.7 | 1.2 | 5.4 | 5.4 | 1 |
| Quadriceps | 0.2 | 0.06 | −3.3 | 1.7 | 0.6 | −2.8 |

TABLE 71
Quantification of transgene mRNA by RT-qPCR following intravenous
administration of AAV particles comprising a TTM-002 capsid

| | 1e12 VG/kg | | | 1e13 VG/kg | | |
|---|---|---|---|---|---|---|
| | AAV9 | TTM-002 | | AAV9 | TTM-002 | |
| | (transgene | (transgene | | (transgene | (transgene | |
| | mRNA fold | mRNA fold | | mRNA fold | mRNA fold | TTM- |
| | over | over | TTM-002 | over | over | 002 |
| | housekeeping | housekeeping | relative to | housekeeping | housekeeping | relative |
| Tissue | gene) (2^{-dCT}) | gene) (2^{-dCT}) | AAV9 | gene) (2^{-dCT}) | gene) (2^{-dCT}) | to AAV9 |
| Putamen | 0.02 | 0.3 | 15 | 0.09 | 4.22 | 47 |
| Caudate | 0.02 | 0.8 | 40 | 0.11 | 4.29 | 39 |
| Thalamus | 0.04 | 0.4 | 10 | 0.4 | 5.8 | 14.5 |
| Hippocampus | 0.02 | 0.4 | 20 | 0.1 | 4.3 | 43 |
| Substantia | 0.1 | 1.2 | 12 | 0.3 | 11.6 | 39 |
| Nigra | | | | | | |
| Motor Cortex | 0.08 | 5.00 | 63 | 0.36 | 21.8 | 61 |
| Frontal | 0.04 | 3.1 | 78 | 0.3 | 27.7 | 92 |
| Cortex | | | | | | |
| Temporal | 0.02 | 0.8 | 40 | 0.1 | 26.9 | 27 |
| Cortex | | | | | | |
| Cerebral | 0.04 | 1.1 | 28 | 0.2 | 17.4 | 87 |
| Cortex | | | | | | |
| Dentate | 0.3 | 0.9 | 3 | 1.8 | 42.0 | 23 |
| Nucleus | | | | | | |
| Cervical | 0.2 | 2.0 | 10 | 0.8 | 20.2 | 25 |
| Spinal Cord | | | | | | |
| Thoracic | 0.13 | 0.25 | 1.9 | 0.7 | 4.8 | 6.9 |
| Spinal Cord | | | | | | |
| Lumbar | 0.4 | 0.5 | 1.3 | 2.2 | 9.2 | 4.2 |
| Spinal Cord | | | | | | |
| C5 Ventral | 0.2 | 1.4 | 7 | 1.7 | 33 | 19 |
| Horn | | | | | | |
| L5 Ventral | 1.1 | 3.4 | 3.1 | 12.4 | 102 | 8.2 |
| Horn | | | | | | |
| Cervical | 3.6 | 1.2 | −3 | 63.1 | 15.9 | −4 |
| DRG | | | | | | |
| Thoracic | 1.8 | 1.3 | −1.4 | 43.9 | 15.7 | −2.8 |
| DRG | | | | | | |
| Lumbar DRG | 1.9 | 1.0 | −1.9 | 34.9 | 27.6 | −1.3 |
| Liver | 0.88 | 0.25 | −3.5 | 2.2 | 0.97 | −2.3 |
| Heart | 8.7 | 42 | 4.8 | 110 | 363 | 3.3 |
| Quadriceps | 9.7 | 1.1 | −8.3 | 59 | 21 | −2.8 |

[1484] Taken together, these data demonstrate that TTM-002 is an enhanced CNS tropic capsid in NHPs (African green monkeys) that can infect non-neuronal cells. TTM-002 was also detargeted in the DRG and liver relative to AAV9, but showed increased transgene expression in the heart relative to AAV9. Additionally, the TTM-002 capsid variant was able to successfully penetrate the blood brain barrier following intravenous injection.

B. Evaluation of TTM-001 and TTM-002 in Marmosets (Callithrix jacchus)

[1485] AAV particles were generated with the TTM-002 capsid variant, the TTM-001 capsid variant, or the AAV9 capsid control which comprised a self-complementary viral genome encoding a histone H2b protein with an MYC tag (TTM-002 capsid variant), His tag (TTM-001 capsid variant), or HA tag (AAV9 control capsid) driven by a ubiquitous CAG promoter. The AAV particles comprising the TTM-002 capsid variant, the TTM-001 capsid variant, or the AAV9 capsid control were administered to the marmosets (Callithrix jacchus) (n=3) intravenously in a single solution, at the doses indicated in Table 29. The in-life period was 28 days and then various CNS and peripheral tissues were collected for measuring transgene mRNA (expression) by RT-qPCR, protein expression by IHC, and viral DNA (biodistribution) by ddPCR. Data were then normalized to the dose of each viral vector in the dosing solution.

TABLE 29
Titer of the AAV particles comprising the various
capsids in solution dosed in marmosets

| Capsid Variant | Actual Titer Dosed | Ratio of Capsid Variant to AAV9 |
|---|---|---|
| TTM-001 | 1.44 vg/mL | 0.34 |
| AAV9 | 4.00 vg/mL | 1.0 |
| TTM-002 | 4.17 vg/mL | 1.0 |

[1486] As shown in Table 72, both the TTM-001 and TTM-002 capsid variants demonstrated increased biodistribution in the caudate and motor cortex in the brain of the marmosets relative to the AAV9 control. The TTM-001 and TTM-002 capsid variants also led to increased transgene expression (Table 73) in the caudate and motor cortex in the brain of the marmosets. In fact, biodistribution and transgene expression were increased over 100-400 fold for both TTM-001 and TTM-002 in the brain relative to AAV9. Similar expression and distribution was observed by immunohistochemistry. More specifically, staining for TTM-001 and TTM-002 was detected in the mid-brain, caudate, putamen, thalamus, and cerebellum, and this staining was increased for both capsid variants in each of these brain tissues relative to AAV9. Staining for TTM-001 and TTM-002 was also observed in the molecular and granule layer of the cerebellum.

[1487] Distribution and transgene expression was also measured in the peripheral tissues of the liver, heart, and quadriceps. In the liver, the TTM-002 capsid variant exhibited lower biodistribution (Table 72) and transgene expression (Table 72) relative to AAV9, indicating that the TTM-002 capsid variant was detargeted in the liver relative to AAV9 in marmosets. The TTM-001 capsid variant demonstrated comparable biodistribution and transgene expression in the liver (Table 72 and Table 73) as well as comparable transgene expression in the heart and muscle (Table 73) relative to AAV9. Both TTM-001 and TTM-002 led to decreased biodistribution (Table 72) relative to AAV9 in the heart and muscle, and TTM-002 also resulted in lower transgene expression in the heart and muscle relative to AAV9 (Table 73).

TABLE 72
Quantification of viral genome copies per diploid genome (biodistribution) by
ddPCR following intravenous administration of AAV particles comprising a TTM-
001 capsid or a TTM-002 capsid normalized to the actual titer of the viral vector
in the dosing solution (vg/dg = viral genome copies/diploid genome)

| | Tissue | | | | | | | | | |
|---|---|---|---|---|---|---|---|---|---|---|
| | Caudate | | Motor Cortex | | Heart | | Muscle | | Liver | |
| | | vg/dg | | vg/dg | | vg/dg | | vg/dg | | vg/dg |
| | | relative | | relative | | relative | | relative | | relative |
| Capsid | vg/dg | to AAV9 | vg/dg | to AAV9 | vg/dg | to AAV9 | vg/dg | to AAV9 | vg/dg | to AAV9 |
| TTM-001 | 1.67 | 142.70 | 2.69 | 124.06 | 0.28 | 0.53 | 0.08 | 0.39 | 14.86 | 0.99 |
| TTM-002 | 3.55 | 294.36 | 5.80 | 264.86 | 0.33 | 0.69 | 0.08 | 0.32 | 6.92 | 0.49 |
| AAV9 | 0.01 | 1.00 | 0.02 | 1.00 | 0.48 | 1.00 | 0.23 | 1.00 | 13.79 | 1.00 |

TABLE 73
Quantification of transgene mRNA by RT-qPCR following intravenous administration of AAV
particles comprising a TTM-001 capsid or a TTM-002 capsid normalized to the actual titer
of the viral vector in the dosing solution (mRNA = transgene mRNA fold over housekeeping
gene; rel. to AAV9 = transgene mRNA fold over housekeeping gene relative to AAV9)

| | Tissue | | | | | | | | | |
|---|---|---|---|---|---|---|---|---|---|---|
| | Caudate | | Motor Cortex | | Heart | | Muscle | | Liver | |
| | | rel. to | | rel. to | | rel. to | | rel. to | | rel. to |
| Capsid | mRNA | AAV9 | mRNA | AAV9 | mRNA | AAV9 | mRNA | AAV9 | mRNA | AAV9 |
| TTM- | 17.56 | 594.71 | 27.80 | 586.23 | 16.05 | 1.40 | 0.26 | 1.19 | 3.23 | 1.93 |
| 001 | | | | | | | | | | |
| TTM- | 14.21 | 479.39 | 19.73 | 410.40 | 2.78 | 0.27 | 0.06 | 0.46 | 0.62 | 0.36 |
| 002 | | | | | | | | | | |
| AAV9 | 0.03 | 1.00 | 0.05 | 1.00 | 12.67 | 1.00 | 0.15 | 1.00 | 1.85 | 1.00 |

[1488] These data in marmosets for TTM-002 were similar to those observed in African green monkeys, further demonstrating cross-species compatibility of the TTM-002 capsid variant.

[1489] Taken together, these data demonstrate that TTM-001 and TTM-002 are enhanced CNS tropic capsid in marmosets. TTM-002 was also detargeted in the liver, heart, and muscle relative to AAV9 in marmosets, where TTM-001 demonstrated comparable biodistribution and/or transgene expression in the liver, heart, and muscle compared to AAV9. Additionally, the TTM-001 and TTM-002 capsid variants were able to successfully penetrate the blood brain barrier following intravenous injection.

### Example 18. In Vivo Characterization of Vectorized Anti-HER2 Monospecific Antibody Molecules Comprising FcRN Modifications

[1490] The biodistribution of HER-04 (SEQ ID NO: 5163; wild-type Fc), HER-47 (SEQ ID NO: 5185; comprising the FcRN modifications: I253A, H310A, H435A, numbered according to the EU index as in Kabat), and HER-42 (SEQ ID NO: 5166; comprising the FcRN modification H435Q, numbered according to the EU index as in Kabat) vectorized in a VOY101 capsid protein (SEQ ID NO: 1) was quantified in mice to determine if FcRN modifications were able reduce serum levels of vectorized antibodies compared to the HER-04 wild-type Fc control.

[1491] CB17/SCID mice (BALB/C background; n=5) were intravenously administered the vectorized HER-004, HER-47, and HER-42 constructs with the VOY101 capsid protein at a dose of 2.5e11 VG/100 uL/injection. At weeks 1, 2 and 3 post IV injection, blood was drawn to measure serum concentrations of hIgG1 (antibody levels in the serum). At 29 days post intravenous administration of the AAV particles, the mice were sacrificed and necropsied to isolate cerebral spinal fluid (CSF), the brain, heart, and liver tissues for hIgG1 quantification (antibody levels in the CNS and peripheral tissues).

### PK/PD Dynamics in the Serum, CSF, Brain, Heart and Liver Post Intravenous Administration of the Vectorized Anti-HER2 Antibodies Comprising FcRN Modifications

[1492] AlphaLISA was used to quantify the levels of hIgG1 in the serum samples isolated at weeks 1, 2, and 3 post-treatment, and the CSF, brain, heart and liver samples isolated at 29 days post-treatment. Table 76 shows the concentration of the HER-04, HER-47, and HER-42 vectorized antibodies in the serum of the mice at weeks 1, 2, and 3 post-treatment. Table 77 provides the concentration of the HER-04, HER-47, and HER-42 vectorized antibodies in the brain, heart, liver, and CSF of the mice at 29-days post-treatment.

TABLE 76
Serum levels of anti-HER2 antibodies at weeks 1, 2, and 3 post-treatment
with vectorized HER-04, HER-47 (I253A, H310A, H435A) or HER-42 (H435Q)

| | Average Serum hIgG1 Levels (μg/ml) | | | Standard Deviation | | |
|---|---|---|---|---|---|---|
| Antibody | Week 1 | Week 2 | Week 3 | Week 1 | Week 2 | Week 3 |
| HER-04 | 26.8 | 48.0 | 77.5 | 10.2 | 17.8 | 37.7 |
| (control; wild-type) | | | | | | |
| HER-47 | 1.2 | 2.5 | 2.5 | 0.8 | 1.9 | 2.8 |
| (I253A, H310A, H435A) | | | | | | |
| HER-42 | 38.2 | 67.7 | | 13.7 | 44.8 | |
| (H435Q) | | | | | | |

TABLE 77
Levels of anti-HER2 antibodies in the CSF, liver, heart,
and brain at 29 days post-treatment with vectorized
HER-04, HER-47 (I253A, H310A, H435A) or HER-42 (H435Q)

| | Average hIgG1 Levels (μg/ml) | | | | Standard Deviation | | | |
|---|---|---|---|---|---|---|---|---|
| Antibody | Brain | Heart | Liver | CSF | Brain | Heart | Liver | CSF |
| HER-04 | 1.7 | 1.5 | 2.9 | 0.3 | 0.60 | 0.76 | 1.54 | 0.06 |
| (control; wild-type Fc) | | | | | | | | |
| HER-47 | 1.0 | 0.0 | 0.1 | 0.4 | 0.23 | 0.04 | 0.14 | 0.43 |
| (I253A, H310A, H435A) | | | | | | | | |
| HER-42 | 3.8 | 1.8 | 0.7 | 1.4 | 3.07 | 0.92 | 0.37 | 0.35 |
| (H435Q) | | | | | | | | |

[1493] As shown in Tables 76 and 77, the serum levels of the vectorized HER-47 antibody comprising the three FcRN modifications, I253A, H310A, H435A, numbered according to the EU index as in Kabat, was markedly reduced compared to the vectorized HER-04 control with the wild-type Fc region. However, the level of the vectorized HER-47 antibody comprising the three FcRN modifications was only partially reduced in the brain, relative to the HER-04 control. These data indicated that the FcRN modifications of I253A, H310A, H435A, numbered according to the EU index as in Kabat, may be useful in reducing serum levels of vectorized anti-HER2 antibodies.

### Example 19. Prophylactic Treatment of HER-103 Vectorized in TTM-002 Capsid Variant

[1494] This example investigated prophylactic treatment in mice following intravenous administration of AAV particles comprising the TTM-002 capsid variant (SEQ ID NO: 982 (amino acid) and 984 (DNA), comprising SEQ ID NO: 2) encapsulating a HER-103 genetic element (SEQ ID NO: 4047, with a GFAP promoter and encoding an anti-HER2 antibody comprising an Fc region comprising the following substitutions L235V, F243L, R292P, Y300L, P396L, I253A, H310A, and H435A numbered according to the EU index as in Kabat) (AAV_TTM-002.HER-103) as compared to treatment with AAV particles comprising the TTM-002 capsid variant encapsulating a genetic element encoding an IgG1 control with the modified Fc region of HER-103 comprising the following substitutions L235V, F243L, R292P, Y300L, P396L, I253A, H310A, and H435A numbered according to the EU index as in Kabat). The Fc region of the anti-HER2 antibody encoded by the HER-103 genetic element comprises mutations that increase ADCC activity and other mutations that reduce binding to the FcRN receptor.

[1495] Dilutions of the AAV_TTM-002.HER-103 or AAV_TTM-002. Control particles were prepared and intravenous injections of 100 μL were administered through the tail veins of female mice, (n=5 mice per cohort; Fox Chase SCID CB17 Mutation: Icr-Prkdcscid/IcrIcoCrl Congenic Immunodeficient from Charles River Laboratories (#3611); 75 days old). Increasing doses of 5e12 VG/kg (1e11 VG), 1.25e13 VG/kg (1.25e13 VG), and 2.5e13 VG/kg (2.5e13 VG) were administered to the mice. Ten days post-administration of the AAV particles, orthotopic xenografts of MDA-MB-361-Luc #1 passage #43 cells grown as tumorspheres (in tumorsphere media; Sigma #C-28070) were injected intracranially (250,000 cells/2 μL/mouse). The injections were 2.5 mm (lateral), −1 mm (posterior) with respect to bregma, lowered −3 mm ventral and raised +0.5 mm dorsal to a final −2.5 mm ventral position. Starting at day 7 post-injection of the xenograft until 48 days post-xenograft, mice were imaged weekly in an AmiHTX (Spectral Imager) for bioluminescence of the human tumor cells expression of luciferase in response to intraperitoneal luciferin injections. Serum samples were also collected at day 28 post intravenous administration to measure serum antibody concentration.

[1496] Prophylactic treatment 10 days prior to xenograft with IV administration of AAV_TTM-002.HER-103 (dosed at 2.5e11 VG/mouse) demonstrated persistent and significant abrogation of tumor growth as compared to isotype control (hIgG1) treated mice (FIG. 21A; 2 Way ANOVA, Dunnett's multiple comparison test). Additionally, there was a dose dependent response observed with respect to tumor growth attenuation across the doses investigated. FIG. 21B shows the comparison of the levels of antibodies produced following administration of the AAV_TTM-002 particles encapsulating the genetic element encoding an isotype control antibody to the AAV_TTM-002 particles encapsulating the genetic element encoding HER-103 in the in the serum, as measured by alphaLISA for the different doses investigated. A dose response was also observed with respect to serum antibody concertation (FIG. 21B), and levels were low. As shown in Table 78, antibody levels were reduced in the serum of mice treated with AAV_TTM-002.HER-103 encoding an antibody comprising mutations that reduced FcRN binding compared to mice treated with AAV particles comprising the TTM-002 capsid encoding the HER-75 genetic element comprising a constitutive CBA promoter bur not the Fc mutations that reduced FcRN binding (SEQ ID NO: 5190) (AAV_TTM-002.HER-75), or the HER-93 genetic element comprising a GFAP promoter but not the Fc mutations that reduce FcRN binding (SEQ ID NO: XX) (AAV_TTM-002.HER-93).

[1497] Antibody levels were also quantified in the brain by Alphalisa. Quantification of human IgG1 was performed and normalized to percent total protein in the brain (Table 78). In contrast to the serum, antibody levels in the brain of mice treated with AAV_TTM-002.HER-103, were higher and equivalent to antibody levels expressed in mice treated with AAV particles comprising the TTM-002 capsid encoding the HER-75 genetic element comprising a constitutive CBA promoter bur not the Fc mutations that reduced FcRN binding (SEQ ID NO: 5190) (AAV_TTM-002.HER-75) or the HER-93 genetic element comprising a GFAP promoter but not the Fc mutations that reduce FcRN binding (SEQ ID NO: XX) (AAV_TTM-002.HER-93).

[1498] Taken together, these data indicate that the mutations in the Fc region of the anti-HER2 antibody encoded by the HER-103 genetic element resulted in reduced serum levels, while still maintaining high antibody levels in the brain, and was able to attenuate tumor burden in a preclinical orthotopic human xenograft model of HER2+ breast cancer brain metastases in mice.

TABLE 78
Quantification of serum or brain antibody levels
following vectorized antibody delivery

| | Serum Human | Brain Human |
|---|---|---|
| | IgG Levels | IgG Levels |
| Treatment | (μg/mL) | (μg/mL) |
| AAV_TTM-002.HER-103 | 1.62 | 1.6 |
| AAV_TTM-002.HER-75 | 91.76 | 1.7 |
| AAV_TTM-002.HER-93 | 36.56 | 1.8 |

### VIII. EQUIVALENTS AND SCOPE

[1499] The disclosures of each and every patent, patent application, and publication cited herein are hereby incorporated herein by reference in their entirety. While this invention has been disclosed with reference to certain embodiments, it is apparent that further embodiments and variations of this invention may be devised by others skilled in the art without departing from the true spirit and scope of the invention. The appended claims are intended to be construed to include all such embodiments and equivalent variations.

What is claimed is:

1. An AAV particle comprising an AAV capsid variant and a nucleic acid encoding an antibody molecule which binds to human HER2/neu, wherein the AAV capsid variant comprises an amino acid sequence having the following formula:
[N1]-[N2]-[N3], wherein:
(i) optionally [N1] comprises X1, X2, and X3, wherein at least one of X1, X2, or X3 is G;
(ii) [N2] comprises the amino acid sequence of SPH; and
(iii) [N3] comprises X4, X5, and X6, wherein at least one of X4, X5, or X6 is a basic amino acid, e.g., a K or R;
wherein [N1]-[N2]-[N3] is present from N-terminus to C-terminus, immediately subsequent to position 452, numbered according to any one of SEQ ID NO: 982 or 981; and
wherein the AAV capsid variant comprises an amino acid sequence at least 95% identical to the amino acid sequence of positions 203-742, e.g., a VP3, of any one of SEQ ID NO: 982 or 981.

2. The AAV particle of claim 1, wherein:
(a) position X4 of [N3] is: K, S, A, V, T, G, F, W, V, N, or R;
(b) position X5 of [N3] is: S, K, T, F, I, L, Y, H, M, or R; and/or
(c) position X6 of [N3] is: G, A, R, M, I, N, T, Y, D, P, V, L, E, W, N, Q, K, or S.

3. The AAV particle of claim 1 or 2, wherein:
(i) [N3] comprises KSG, SKA, ARM, VKS, ASR, VKI, KKN, VRM, RKA, KTS, KFG, KIG, KLG, KTT, KTY, KYG, SKD, SKP, TRG, VRG, KRG, GAR, KSA, KSR, SKL, SRA, SKR, SLR, SRG, SSR, FLR, SKW, SKS, WKA, VRR, SKV, SKT, SKG, GKA, TKA, NKA, SKL, SKN, AKA, KTG, KSL, KSE, KSV, KSW, KSN, KHG, KSQ, KSK, KLW, WKG, KMG, KMA, or RSG; or
(ii) [N2]-[N3] comprises SPHSKA (SEQ ID NO: 941), SPHKSG (SEQ ID NO: 946), SPHARM (SEQ ID NO: 947), SPHVKS (SEQ ID NO: 948), SPHASR (SEQ ID NO: 949), SPHVKI (SEQ ID NO: 950), SPHKKN (SEQ ID NO: 954), SPHVRM (SEQ ID NO: 955), SPHRKA (SEQ ID NO: 956), SPHKFG (SEQ ID NO: 957), SPHKIG (SEQ ID NO: 958), SPHKLG (SEQ ID NO: 959), SPHKTS (SEQ ID NO: 963), SPHKTT (SEQ ID NO: 964), SPHKTY (SEQ ID NO: 965), SPHKYG (SEQ ID NO: 966), SPHSKD (SEQ ID NO: 967), SPHSKP (SEQ ID NO: 968), SPHTRG (SEQ ID NO: 972), SPHVRG (SEQ ID NO: 973), SPHKRG (SEQ ID NO: 974), SPHGAR (SEQ ID NO: 975), SPHKSA (SEQ ID NO: 977), SPHKSR (SEQ ID NO: 951), SPHSKL (SEQ ID NO: 960), SPHSRA (SEQ ID NO: 969), SPHSKR (SEQ ID NO: 978), SPHSLR (SEQ ID NO: 952), SPHSRG (SEQ ID NO: 961), SPHSSR (SEQ ID NO: 970), SPHFLR (SEQ ID NO: 979), SPHSKW (SEQ ID NO: 953), SPHSKS (SEQ ID NO: 962), SPHWKA (SEQ ID NO: 971), SPHVRR (SEQ ID NO: 980), SPHSKT (SEQ ID NO: 6647), SPHSKG (SEQ ID NO: 6648), SPHGKA (SEQ ID NO: 6649), SPHNKA (SEQ ID NO: 6650), SPHSKN (SEQ ID NO: 6651), SPHAKA (SEQ ID NO: 6652), SPHSKV (SEQ ID NO: 6653), SPHKTG (SEQ ID NO: 6654), SPHTKA (SEQ ID NO: 6655), SPHKSL (SEQ ID NO: 6656), SPHKSE (SEQ ID NO: 6657), SPHKSV (SEQ ID NO: 6658), SPHKSW (SEQ ID NO: 6659), SPHKSN (SEQ ID NO: 6660), SPHKHG (SEQ ID NO: 6661), SPHKSQ (SEQ ID NO: 6662), SPHKSK (SEQ ID NO: 6663), SPHKLW (SEQ ID NO: 6664), SPHWKG (SEQ ID NO: 6665), SPHKMG (SEQ ID NO: 6666), SPHKMA (SEQ ID NO: 6667), or SPHRSG (SEQ ID NO: 976).

4. The AAV particle of any one of claims 1-3, wherein:
(a) position X1 of [N1] is: G, V, R, D, E, M, T, 1, S, A, N, L, K, H, P, W, or C;
(b) position X2 of [N1] is: H, S, V, L, N, D, R, P, G, T, I, A, E, Y, M, or Q; and/or
(c) position X3 of [N1] is: D, G, C, L, E, Y, H, V, A, N, P, or S.

5. The AAV particle of any one of claims 1-4, wherein:
(i) [N1] comprises GHD, GSG, GQD, VSG, CSG, GRG, CSH, GQS, GSH, RVG, GSC, GLL, GDD, GHE, GNY, MSG, RNG, TSG, ISG, GPG, ESG, SSG, GNG, ASG, NSG, LSG, GGG, KSG, HSG, GTG, PSG, GSV, RSG, GIG, WSG, DSG, IDG, GLG, DAG, DGG, MEG, ENG, GSA, KNG, KEG, AIG, GYD, GHG, GRD, GND, GPD, GMG, GQV, GHN, GHP, or GHS;
(ii)
[N1]-[N2] comprises
(SEQ ID NO: 6700)
GSGSPH,
(SEQ ID NO: 6701)
GHDSPH,
(SEQ ID NO: 6702)
GQDSPH,
(SEQ ID NO: 6703)
VSGSPH,
(SEQ ID NO: 6704)
CSGSPH,
(SEQ ID NO: 6705)
GRGSPH,
(SEQ ID NO: 6706)
CSHSPH,
(SEQ ID NO: 6707)
GQSSPH,
(SEQ ID NO: 6708)
GSHSPH,
(SEQ ID NO: 6709)
GDDSPH,
(SEQ ID NO: 6710)
GHESPH,
(SEQ ID NO: 6711)
GNYSPH,
(SEQ ID NO: 6712)
RVGSPH,
(SEQ ID NO: 6713)
GSCSPH,
(SEQ ID NO: 6714)
GLLSPH,
(SEQ ID NO: 6715)
MSGSPH,
(SEQ ID NO: 6716)
RNGSPH,
(SEQ ID NO: 6717)
TSGSPH,
(SEQ ID NO: 6718)
ISGSPH,
(SEQ ID NO: 6719)
GPGSPH,
(SEQ ID NO: 6720)
ESGSPH,
(SEQ ID NO: 6721)
SSGSPH,
(SEQ ID NO: 6722)
GNGSPH,
(SEQ ID NO: 6723)
ASGSPH,
(SEQ ID NO: 6724)
NSGSPH,
(SEQ ID NO: 6725)
LSGSPH,
(SEQ ID NO: 6727)
KSGSPH,
(SEQ ID NO: 6728)
HSGSPH,
(SEQ ID NO: 6729)
GTGSPH,
(SEQ ID NO: 6730)
PSGSPH,
(SEQ ID NO: 6731)
GSVSPH,
(SEQ ID NO: 6732)
RSGSPH,
(SEQ ID NO: 6733)
GIGSPH,
(SEQ ID NO: 6734)
WSGSPH,
(SEQ ID NO: 6735)
DSGSPH,
(SEQ ID NO: 6736)
IDGSPH,
(SEQ ID NO: 6737)
GLGSPH,
(SEQ ID NO: 6738)
DAGSPH,
(SEQ ID NO: 6739)
DGGSPH,
(SEQ ID NO: 6740)
MEGSPH,
(SEQ ID NO: 6741)
ENGSPH,
(SEQ ID NO: 6742)
GSASPH,
(SEQ ID NO: 6743)
KNGSPH,
(SEQ ID NO: 6744)
KEGSPH,
(SEQ ID NO: 6745)
AIGSPH,
(SEQ ID NO: 6746)
GYDSPH,
(SEQ ID NO: 6747)
GHGSPH,
(SEQ ID NO: 6748)
GRDSPH,
(SEQ ID NO: 6749)
GNDSPH,
(SEQ ID NO: 6750)
GPDSPH,
(SEQ ID NO: 6751)
GMGSPH,
(SEQ ID NO: 6752)
GQVSPH,
(SEQ ID NO: 6753)
GHNSPH,
(SEQ ID NO: 6754)
GHPSPH,
or
(SEQ ID NO: 6755)
GHSSPH;
or
(iii)
[N1]-[N2]-[N3] comprises
(SEQ ID NO: 6613)
GSGSPHSKA,
(SEQ ID NO: 6615)
GHDSPHKSG,
(SEQ ID NO: 6823)
GSGSPHARM,
(SEQ ID NO: 6824)
GSGSPHVKS,
(SEQ ID NO: 6825)
GQDSPHKSG,
(SEQ ID NO: 6826)
GSGSPHASR,
(SEQ ID NO: 6827)
GSGSPHVKI,
(SEQ ID NO: 6828)
GSGSPHKKN,
(SEQ ID NO: 6829)
GSGSPHVRM,
(SEQ ID NO: 6830)
VSGSPHSKA,
(SEQ ID NO: 6831)
CSGSPHSKA,
(SEQ ID NO: 6832)
GSGSPHRKA,
(SEQ ID NO: 6833)
CSGSPHKTS,
(SEQ ID NO: 6834)
CSHSPHKSG,
(SEQ ID NO: 6835)
GQSSPHRSG,
(SEQ ID NO: 6836)
GRGSPHASR,
(SEQ ID NO: 6837)
GRGSPHSKA,
(SEQ ID NO: 6838)
GSGSPHKFG,
(SEQ ID NO: 6839)
GSGSPHKIG,
(SEQ ID NO: 6840)
GSGSPHKLG,
(SEQ ID NO: 6841)
GSGSPHKTS,
(SEQ ID NO: 6842)
GSGSPHKTT,
(SEQ ID NO: 6843)
GSGSPHKTY,
(SEQ ID NO: 6844)
GSGSPHKYG,
(SEQ ID NO: 6845)
GSGSPHSKD,
(SEQ ID NO: 6846)
GSGSPHSKP,
(SEQ ID NO: 6847)
GSGSPHTRG,
(SEQ ID NO: 6848)
GSGSPHVRG,
(SEQ ID NO: 6849)
GSHSPHKRG,
(SEQ ID NO: 6850)
GSHSPHKSG,
(SEQ ID NO: 6851)
VSGSPHASR,
(SEQ ID NO: 6852)
VSGSPHGAR,
(SEQ ID NO: 6853)
VSGSPHKFG,
(SEQ ID NO: 6854)
GHDSPHKRG,
(SEQ ID NO: 6855)
GDDSPHKSG,
(SEQ ID NO: 6856)
GHESPHKSA,
(SEQ ID NO: 6857)
GHDSPHKSA,
(SEQ ID NO: 6858)
GNYSPHKIG,
(SEQ ID NO: 6859)
GHDSPHKSR,
(SEQ ID NO: 6860)
GSGSPHSKL,
(SEQ ID NO: 6861)
GSGSPHSRA,
(SEQ ID NO: 6862)
GSGSPHSKR,
(SEQ ID NO: 6863)
GSGSPHSLR,
(SEQ ID NO: 6864)
GSGSPHSRG,
(SEQ ID NO: 6865)
GSGSPHSSR,
(SEQ ID NO: 6866)
RVGSPHSKA,
(SEQ ID NO: 6867)
GSCSPHRKA,
(SEQ ID NO: 6868)
GSGSPHFLR,
(SEQ ID NO: 6869)
GSGSPHSKW,
(SEQ ID NO: 6870)
GSGSPHSKS,
(SEQ ID NO: 6871)
GLLSPHWKA,
(SEQ ID NO: 6872)
GSGSPHVRR,
(SEQ ID NO: 6873)
GSGSPHSKV,
(SEQ ID NO: 6874)
MSGSPHSKA,
(SEQ ID NO: 6875)
RNGSPHSKA,
(SEQ ID NO: 6876)
TSGSPHSKA,
(SEQ ID NO: 6877)
ISGSPHSKA,
(SEQ ID NO: 6878)
GPGSPHSKA,
(SEQ ID NO: 6879)
GSGSPHSKT,
(SEQ ID NO: 6880)
ESGSPHSKA,
(SEQ ID NO: 6881)
SSGSPHSKA,
(SEQ ID NO: 6882)
GNGSPHSKA,
(SEQ ID NO: 6883)
ASGSPHSKA,
(SEQ ID NO: 6884)
NSGSPHSKA,
(SEQ ID NO: 6885)
LSGSPHSKA,
(SEQ ID NO: 6886)
GGGSPHSKA,
(SEQ ID NO: 6887)
KSGSPHSKA,
(SEQ ID NO: 6888)
GGGSPHSKS,
(SEQ ID NO: 6889)
GSGSPHSKG,
(SEQ ID NO: 6890)
HSGSPHSKA,
(SEQ ID NO: 6891)
GTGSPHSKA,
(SEQ ID NO: 6892)
PSGSPHSKA,
(SEQ ID NO: 6893)
GSVSPHGKA,
(SEQ ID NO: 6894)
RSGSPHSKA,
(SEQ ID NO: 6895)
GSGSPHTKA,
(SEQ ID NO: 6896)
GIGSPHSKA,
(SEQ ID NO: 6897)
WSGSPHSKA,
(SEQ ID NO: 6898)
DSGSPHSKA,
(SEQ ID NO: 6899)
IDGSPHSKA,
(SEQ ID NO: 6900)
GSGSPHNKA,
(SEQ ID NO: 6901)
GLGSPHSKS,
(SEQ ID NO: 6902)
DAGSPHSKA,
(SEQ ID NO: 6903)
DGGSPHSKA,
(SEQ ID NO: 6904)
MEGSPHSKA,
(SEQ ID NO: 6905)
ENGSPHSKA,
(SEQ ID NO: 6906)
GSASPHSKA,
(SEQ ID NO: 6907)
GNGSPHSKS,
(SEQ ID NO: 6908)
KNGSPHSKA,
(SEQ ID NO: 6909)
KEGSPHSKA,
(SEQ ID NO: 6910)
AIGSPHSKA,
(SEQ ID NO: 6911)
GSGSPHSKN,
(SEQ ID NO: 6912)
GSGSPHAKA,
(SEQ ID NO: 6913)
GHDSPHKIG,
(SEQ ID NO: 6914)
GYDSPHKSG,
(SEQ ID NO: 6915)
GHESPHKSG,
(SEQ ID NO: 6916)
GHDSPHKTG,
(SEQ ID NO: 6917)
GRGSPHKRG,
(SEQ ID NO: 6825)
GQDSPHKSG,
(SEQ ID NO: 6918)
GHDSPHKSL,
(SEQ ID NO: 6919)
GHGSPHSKA,
(SEQ ID NO: 6920)
GHDSPHKSE,
(SEQ ID NO: 6830)
VSGSPHSKA,
(SEQ ID NO: 6921)
GRDSPHKSG,
(SEQ ID NO: 6922)
GNDSPHKSV,
(SEQ ID NO: 6923)
GQDSPHKIG,
(SEQ ID NO: 6924)
GHDSPHKSV,
(SEQ ID NO: 6925)
GPDSPHKIG,
(SEQ ID NO: 6926)
GPDSPHKSG,
(SEQ ID NO: 6927)
GHDSPHKSW,
(SEQ ID NO: 6928)
GHDSPHKSN,
(SEQ ID NO: 6929)
GMGSPHSKT,
(SEQ ID NO: 6930)
GHDSPHKHG,
(SEQ ID NO: 6931)
GQVSPHKSG,
(SEQ ID NO: 6932)
GDDSPHKSV,
(SEQ ID NO: 6933)
GHNSPHKSG,
(SEQ ID NO: 6934)
GNGSPHKRG,
(SEQ ID NO: 6935)
GHDSPHKYG,
(SEQ ID NO: 6936)
GHDSPHKSQ,
(SEQ ID NO: 6937)
GNDSPHKIG,
(SEQ ID NO: 6938)
GHDSPHKSK,
(SEQ ID NO: 6939)
GHDSPHKLW,
(SEQ ID NO: 6940)
GHPSPHWKG,
(SEQ ID NO: 6941)
GHDSPHKMG,
(SEQ ID NO: 6942)
GHDSPHKMA,
or
(SEQ ID NO: 6943)
GHSSPHRSG.

6. The AAV particle of any one of claims 1-5, wherein:
(a) [N1]-[N2]-[N3] comprises GHDSPHKSG (SEQ ID NO: 4698); or
(b) [N1]-[N2]-[N3] comprises GSGSPHSKA (SEQ ID NO: 4697).

7. The AAV particle of any one of claims 1-6, which further comprises:
(i) [N4], wherein [N4] comprises QNQQ (SEQ ID NO: 6945), WNQQ (SEQ ID NO: 6946), QYYV (SEQ ID NO: 6947), RRQQ (SEQ ID NO: 6948), GCGQ (SEQ ID NO: 6949), LRQQ (SEQ ID NO: 6950), RNQQ (SEQ ID NO: 6951), VNQQ (SEQ ID NO: 6952), FRLQ (SEQ ID NO: 6953), FNQQ (SEQ ID NO: 6954), LLQQ (SEQ ID NO: 6955), SNQQ (SEQ ID NO: 6956), RLQQ (SEQ ID NO: 6957), LNQQ (SEQ ID NO: 6958), QRKL (SEQ ID NO: 6959), LRRQ (SEQ ID NO: 6960), QRLR (SEQ ID NO: 6961), QRRL (SEQ ID NO: 6962), RRLQ (SEQ ID NO: 6963), RLRQ (SEQ ID NO: 6964), SKRQ (SEQ ID NO: 6965), QLYR (SEQ ID NO: 6966), QLTV (SEQ ID NO: 6967), QNKQ (SEQ ID NO: 6968), KNQQ (SEQ ID NO: 6969), QKQQ (SEQ ID NO: 6970), QTQQ (SEQ ID NO: 6971), QNHQ (SEQ ID NO: 6972), QHQQ (SEQ ID NO: 6973), QNQH (SEQ ID NO: 6974), QHRQ (SEQ ID NO: 6975), LTQQ (SEQ ID NO: 6976), QNQW (SEQ ID NO: 6977), QNTH (SEQ ID NO: 6978), RRRQ (SEQ ID NO: 6979), QYQQ (SEQ ID NO: 6980), QNDQ (SEQ ID NO: 6981), QNRH (SEQ ID NO: 6982), RDQQ (SEQ ID NO: 6983), PNLQ (SEQ ID NO: 6984), HVRQ (SEQ ID NO: 6985), PNQH (SEQ ID NO: 6986), HNQQ (SEQ ID NO: 6987), QSQQ (SEQ ID NO: 6988), QPAK (SEQ ID NO: 6989), QNLA (SEQ ID NO: 6990), QNQL (SEQ ID NO: 6991), QGQQ (SEQ ID NO: 6992), LNRQ (SEQ ID NO: 6993), QNPP (SEQ ID NO: 6994), QNLQ (SEQ ID NO: 6995), QDQE (SEQ ID NO: 6996), QDQQ (SEQ ID NO: 6997), HWQQ (SEQ ID NO: 6998), PNQQ (SEQ ID NO: 6999), PEQQ (SEQ ID NO: 7000), QRTM (SEQ ID NO: 7001), LHQH (SEQ ID NO: 7002), QHRI (SEQ ID NO: 7003), QYIH (SEQ ID NO: 7004), QKFE (SEQ ID NO: 7005), QFPS (SEQ ID NO: 7006), QNPL (SEQ ID NO: 7007), QAIK (SEQ ID NO: 7008), QNRQ (SEQ ID NO: 7009), QYQH (SEQ ID NO: 7010), QNPQ (SEQ ID NO: 7011), QHQL (SEQ ID NO: 7012), QSPP (SEQ ID NO: 7013), QAKL (SEQ ID NO: 7014), KSQQ (SEQ ID NO: 7015), QDRP (SEQ ID NO: 7016), QNLG (SEQ ID NO: 7017), QAFH (SEQ ID NO: 7018), QNAQ (SEQ ID NO: 7019), HNQL (SEQ ID NO: 7020), QKLN (SEQ ID NO: 7021), QNVQ (SEQ ID NO: 7022), QAQQ (SEQ ID NO: 7023), QTPP (SEQ ID NO: 7024), QPPA (SEQ ID NO: 7025), QERP (SEQ ID NO: 7026), QDLQ (SEQ ID NO: 7027), QAMH (SEQ ID NO: 7028), QHPS (SEQ ID NO: 7029), PGLQ (SEQ ID NO: 7030), QGIR (SEQ ID NO: 7031), QAPA (SEQ ID NO: 7032), QIPP (SEQ ID NO: 7033), QTQL (SEQ ID NO: 7034), QAPS (SEQ ID NO: 7035), QNTY (SEQ ID NO: 7036), QDKQ (SEQ ID NO: 7037), QNHL (SEQ ID NO: 7038), QIGM (SEQ ID NO: 7039), LNKQ (SEQ ID NO: 7040), PNQL (SEQ ID NO: 7041), QLQQ (SEQ ID NO: 7042), QRMS (SEQ ID NO: 7043), QGIL (SEQ ID NO: 7044), QDRQ (SEQ ID NO: 7045), RDWQ (SEQ ID NO: 7046), QERS (SEQ ID NO: 7047), QNYQ (SEQ ID NO: 7048), QRTC (SEQ ID NO: 7049), QIGH (SEQ ID NO: 7050), QGAI (SEQ ID NO: 7051), QVPP (SEQ ID NO: 7052), QVQQ (SEQ ID NO: 7053), LMRQ (SEQ ID NO: 7054), QYSV (SEQ ID NO: 7055), QAIT (SEQ ID NO: 7056), QKTL (SEQ ID NO: 7057), QLHH (SEQ ID NO: 7058), QNII (SEQ ID NO: 7059), QGHH (SEQ ID NO: 7060), QSKV (SEQ ID NO: 7061), QLPS (SEQ ID NO: 7062), IGKQ (SEQ ID NO: 7063), QAIH (SEQ ID NO: 7064), QHGL (SEQ ID NO: 7065), QFMC (SEQ ID NO: 7066), QNQM (SEQ ID NO: 7067), QHLQ (SEQ ID NO: 7068), QPAR (SEQ ID NO: 7069), QSLQ (SEQ ID NO: 7070), QSQL (SEQ ID NO: 7071), HSQQ (SEQ ID NO: 7072), QMPS (SEQ ID NO: 7073), QGSL (SEQ ID NO: 7074), QVPA (SEQ ID NO: 7075), HYQQ (SEQ ID NO: 7076), QVPS (SEQ ID NO: 7077), RGEQ (SEQ ID NO: 7078), PGQQ (SEQ ID NO: 7079), LEQQ (SEQ ID NO: 7080), QNQS (SEQ ID NO: 7081), QKVI (SEQ ID NO: 7082), QNND (SEQ ID NO: 7083), QSVH (SEQ ID NO: 7084), QPLG (SEQ ID NO: 7085), HNQE (SEQ ID NO: 7086), QIQQ (SEQ ID NO: 7087), QVRN (SEQ ID NO: 7088), PSNQ (SEQ ID NO: 7089), QVGH (SEQ ID NO: 7090), QRDI (SEQ ID NO: 7091), QMPN (SEQ ID NO: 7092), RGLQ (SEQ ID NO: 7093), PSLQ (SEQ ID NO: 7094), QRDQ (SEQ ID NO: 7095), QAKG (SEQ ID NO: 7096), QSAH (SEQ ID NO: 7097), QSTM (SEQ ID NO: 7098), QREM (SEQ ID NO: 7099), QYRA (SEQ ID NO: 7100), QRQQ (SEQ ID NO: 7101), QWQQ (SEQ ID NO: 7102), QRMN (SEQ ID NO: 7103), GDSQ (SEQ ID NO: 7104), QKIS (SEQ ID NO: 7105), PSMQ (SEQ ID NO: 7106), SPRQ (SEQ ID NO: 7107), MEQQ (SEQ ID NO: 7108), QYQN (SEQ ID NO: 7109), QIRQ (SEQ ID NO: 7110), QSVQ (SEQ ID NO: 7111), RSQQ (SEQ ID NO: 7112), QNKL (SEQ ID NO: 7113), QIQH (SEQ ID NO: 7114), PRQQ (SEQ ID NO: 7115), HTQQ (SEQ ID NO: 7116), QRQH (SEQ ID NO: 7117), RNQE (SEQ ID NO: 7118), QSKQ (SEQ ID NO: 7119), QNQP (SEQ ID NO: 7120), QSPQ (SEQ ID NO: 7121), QTRQ (SEQ ID NO: 7122), QNLH (SEQ ID NO: 7123), QNQE (SEQ ID NO: 7124), LNQP (SEQ ID NO: 7125), QNQD (SEQ ID NO: 7126), QNLL (SEQ ID NO: 7127), QLVI (SEQ ID NO: 7128), RTQE (SEQ ID NO: 7129), QTHQ (SEQ ID NO: 7130), QDQH (SEQ ID NO: 7131), QSQH (SEQ ID NO: 7132), VRQQ (SEQ ID NO: 7133), AWQQ (SEQ ID NO: 7134), QSVP (SEQ ID NO: 7135), QNIQ (SEQ ID NO: 7136), LDQQ (SEQ ID NO: 7137), PDQQ (SEQ ID NO: 7138), ESQQ (SEQ ID NO: 7139), QRQL (SEQ ID NO: 7140), QIIV (SEQ ID NO: 7141), QKQS (SEQ ID NO: 7142), QSHQ (SEQ ID NO: 7143), QFVV (SEQ ID NO: 7144), QSQP (SEQ ID NO: 7145), QNEQ (SEQ ID NO: 7146), INQQ (SEQ ID NO: 7147), RNRQ (SEQ ID NO: 7148), RDQK (SEQ ID NO: 7149), QWKR (SEQ ID NO: 7150), ENRQ (SEQ ID NO: 7151), QTQP (SEQ ID NO: 7152), QKQL (SEQ ID NO: 7153), RNQL (SEQ ID NO: 7154), ISIQ (SEQ ID NO: 7155), QTVC (SEQ ID NO: 7156), QQIM (SEQ ID NO: 7157), LNHQ (SEQ ID NO: 7158), QNQA (SEQ ID NO: 7159), QMIH (SEQ ID NO: 7160), RNHQ (SEQ ID NO: 7161), or QKMN (SEQ ID NO: 7162); and/or
(ii) [N0], wherein [N0] comprises TIN, SMN, TIM, YLS, GLS, MPE, MEG, MEY, AEW, CEW, ANN, IPE, ADM, IEY, ADY, IET, MEW, CEY, RIN, MEI, LEY, ADW, IEI, DIM, FEQ, MEF, CDQ, LPE, IEN, MES, AEI, VEY, IIN, TSN, IEV, MEM, AEV, MDA, VEW, AEQ, LEW, MEL, MET, MEA, IES, MEV, CEI, ATN, MDG, QEV, ADQ, NMN, IEM, ISN, TGN, QQQ, HDW, IEG, TII, TFP, TEK, EIN, TVN, TFN, SIN, TER, TSY, ELH, AIN, SVN, TDN, TFH, TVH, TEN, TSS, TID, TCN, NIN, TEH, AEM, AIK, TDK, TFK, SDQ, TEI, NTN, TET, SIK, TEL, TEA, TAN, TIY, TFS, TES, TTN, TED, TNN, EVH, TIS, TVR, TDR, TIK, NHI, TIP, ESD, TDL, TVP, TVI, AEH, NCL, TVK, NAD, TIT, NCV, TIR, NAL, VIN, TIQ, TEF, TRE, QGE, SEK, NVN, GGE, EFV, SDK, TEQ, EVQ, TEY, NCW, TDV, SDI, NSI, NSL, EVV, TEP, SEL, TWQ, TEV, AVN, GVL, TLN, TEG, TRD, NAI, AEN, AET, ETA, NNL.

8. The AAV capsid particle of claim 7, wherein [N0]-[N1]-[N2]-[N3]-[N4] comprises the amino acid sequence of any one of SEQ ID NOs: 2243, 2242, 2242-2886.

9. The AAV particle of claim 7 or 8, which comprises from N-terminus to C-terminus [N0]-[N1]-[N2]-[N3]-[N4], wherein:
(A) (i) [N0] is present immediately subsequent to position 449 and replaces positions 450-452 (e.g., T450, I451, and N452), numbered according to the amino acid sequence of any one of SEQ ID NOs: 982, 981, or 138;
(ii) [N1] is present immediately subsequent to position 452 and replaces positions 453-455, numbered according to the amino acid sequence of SEQ ID NO: 138;
(iii) [N2] is present immediately subsequent to position 455, numbered according to the amino acid sequence of SEQ ID NO: 138;
(iv) [N3] is present immediately subsequent to [N2]; and/or
(v) [N4] is present immediately subsequent to position 455 and replaces positions 456-459 (e.g., Q456, N457, Q458, and Q459), numbered according to the amino acid sequence of SEQ ID NO: 138; or
(B) (i) [N2]-[N3]-[N4] corresponds to positions 456-465 of SEQ ID NO: 982 or 981;
(ii) [N1]-[N2]-[N3] corresponds to positions 453-461 of SEQ ID NO: 982 or 981; and/or
(iii) [N0]-[N1]-[N2]-[N3]-[N4] corresponds to positions 450-465 of SEQ ID NO: 982 or 981.

10. An AAV particle comprising an AAV capsid variant and a nucleic acid encoding an antibody molecule which binds to human HER2/neu, wherein the AAV capsid variant comprises:
(a) the amino acid sequence of any of the sequences provided in Tables 1, 2A, 2B, 9-11, 13-19;
(b) an amino acid sequence comprising at least 3, 4, 5, 6, 7, 8, 9, 10, 11, 12, 13, 14, 15, 16, or 17 consecutive amino acids from any one of the sequences provided in Tables 1, 2A, 2B, 9-11, 13-19; or
(c) an amino acid sequence comprising at least one, two, or three but no more than four different amino acids, relative to any one of the sequences provided in Tables 1, 2A, 2B, 9-11, 13-19; or
(d) an amino acid sequence comprising at least one, two, or three but no more than four modifications, e.g., substitutions (e.g., conservative substitutions), relative to the amino acid sequence of any one of the sequences provided in Tables 1, 2A, 2B, 9-11, 13-19.

11. The AAV particle of claim 10, wherein:
(i) the 3 consecutive amino acids comprise HDS;
(ii) the 4 consecutive amino acids comprise HDSP (SEQ ID NO: 4702);
(iii) the 5 consecutive amino acids comprise HDSPH (SEQ ID NO: 4703); and/or
(iv) the 6 consecutive amino acids comprise HDSPHK (SEQ ID NO: 2);
optionally wherein the amino acid sequence of (i)-(iv) is present immediately subsequent to position 453, numbered according to SEQ ID NO: 982 or 138.

12. The AAV particle of any one of claim 10, wherein:
(i) the 3 consecutive amino acids comprise SPH;
(ii) the 4 consecutive amino acids comprise SPHS (SEQ ID NO: 4700);
(iii) the 5 consecutive amino acids comprise SPHSK (SEQ ID NO: 4701); and/or
(iv) the 6 consecutive amino acids comprise SPHSKA (SEQ ID NO: 941)
optionally wherein the amino acid sequence of (i)-(iv) is present immediately subsequent to position 455, numbered according to SEQ ID NO: 982 or 138.

13. The AAV particle of any one of claims 10-12, wherein the amino acid sequence is present:
(i) in loop IV, optionally wherein loop IV comprises positions 449-460, numbered according to SEQ ID NO: 138;
(ii) immediately subsequent to position 448, 449, 450, 451, 452, 453, 454, or 455, relative to a reference sequence numbered according to the amino acid sequence of SEQ ID NO: 138;
(iii) immediately subsequent to position 453, relative to a reference sequence numbered according to the amino acid sequence of SEQ ID NO: 138 or 982; and/or
(iv) immediately subsequent to position 455, relative to a reference sequence numbered according to the amino acid sequence of SEQ ID NO: 138 or 981.

14. The AAV particle of any one of claims 1-15, comprising:
(i) the amino acid sequence of HDSPHK (SEQ ID NO: 2), wherein the amino acid sequence is present immediately subsequent to position 453, relative to a reference sequence numbered according to the amino acid sequence of SEQ ID NO: 138 or 982; or
(ii) the amino acid sequence of SPHSKA (SEQ ID NO: 941), wherein the amino acid sequence is present immediately subsequent to position 455, relative to a reference sequence numbered according to the amino acid sequence of SEQ ID NO: 138 or 981.

15. The AAV particle of any one of the preceding claims, wherein:
(i) the AAV capsid variant further comprises a modification, e.g., an insertion, substitution (e.g., conservative substitution), and/or deletion, in loop I, II, VI and/or VIII;
(ii) the AAV capsid variant further comprises a substitution at position K449, e.g., a K449R substitution, numbered according to SEQ ID NO: 138;
(iii) the AAV capsid variant comprises an amino acid sequence comprising at least one, two or three modifications, e.g., substitutions (e.g., conservative substitutions), but not more than 30, 20 or 10 modifications, e.g., substitutions (e.g., conservative substitutions), relative to the amino acid sequence of SEQ ID NO: 138;
(iv) the AAV capsid variant comprises an amino acid sequence comprising at least one, two or three, but no more than 30, 20 or 10 different amino acids relative to the amino acid sequence of SEQ ID NO: 138;
(v) the AAV capsid variant comprises the amino acid sequence of positions 138-742, e.g., a VP2, of SEQ ID NO: 138, or a sequence with at least 95%, 96%, 97%, 98%, or 99% sequence identity thereto;
(vi) the AAV capsid variant comprises the amino acid sequence of SEQ ID NO: 138, or an amino acid sequence with at least 95%, 96%, 97%, 98%, or 99% sequence identity thereto;
(vii) the AAV capsid variant comprises an amino acid sequence encoded by the nucleotide sequence of SEQ ID NO: 137, or a sequence with at least 95%, 96%, 97%, 98%, or 99% sequence identity thereto; and/or
(viii) the nucleotide sequence encoding the capsid variant comprises the nucleotide sequence of SEQ ID NO: 137, or a sequence with at least 95%, 96%, 97%, 98%, or 99% sequence identity thereto.

16. The AAV particle of any one of the preceding claims, which comprises:
(i) a VP1 protein, a VP2 protein, a VP3 protein, or a combination thereof;
(ii) the amino acid sequence corresponding to positions 138-742, e.g., a VP2, of SEQ ID NO: 981 or 982, or a sequence with at least 95%, 96%, 97%, 98%, or 99% sequence identity thereto;
(iii) the amino acid sequence of any one of SEQ ID NO: 981 or 982 (e.g., a VP1), or an amino acid sequence with at least 95%, 96%, 97%, 98%, or 99% sequence identity thereto;
(iv) an amino acid sequence comprising at least one, two or three modifications, e.g., substitutions (e.g., conservative substitutions), but not more than 30, 20 or 10 modifications, e.g., substitutions (e.g., conservative substitutions), relative to the amino acid sequence of SEQ ID NO: 981 or 982; and/or
(v) an amino acid sequence comprising at least one, two or three, but not more than 30, 20 or 10 different amino acids, relative to the amino acid sequence of SEQ ID NO: 981 or 982.

17. The AAV particle of any one of claims 1-11 or 13-16, wherein:
(i) the AAV capsid variant comprises the amino acid sequence of SEQ ID NO: 982, or an amino acid sequence with at least 95, 96, 97, 98, or 99% sequence identity thereto;
(ii) the AAV capsid variant comprises an amino acid sequence comprising at least one, two or three modifications, e.g., substitutions (e.g., conservative substitutions), but not more than 30, 20 or 10 modifications, e.g., substitutions (e.g., conservative substitutions), relative to the amino acid sequence of SEQ ID NO: 982;
(iii) the AAV capsid variant comprises an amino acid sequence comprising at least one, two or three, but not more than 30, 20 or 10 different amino acids, relative to the amino acid sequence of SEQ ID NO: 982;
(iv) the AAV capsid variant comprises an amino acid sequence encoded by the nucleotide sequence of SEQ ID NO: 984, or a nucleotide sequence with at least 95, 96, 97, 98, or 99% sequence identity thereto;
(v) the nucleotide sequence encoding the AAV capsid variant comprises the nucleotide sequence of SEQ ID NO: 984, or a nucleotide sequence with at least 95, 96, 97, 98, or 99% sequence identity thereto, optionally wherein the nucleotide sequence is codon optimized.

18. The AAV particle of any one of claims 1-10 or 12-16, wherein:
(i) the AAV capsid variant comprises the amino acid sequence of SEQ ID NO: 981, or an amino acid sequence with at least 95%, 96%, 97%, 98%, or 99% sequence identity thereto;
(ii) the AAV capsid variant comprises an amino acid sequence comprising at least one, two or three modifications, e.g., substitutions (e.g., conservative substitutions), but not more than 30, 20 or 10 modifications, e.g., substitutions (e.g., conservative substitutions), relative to the amino acid sequence of SEQ ID NO: 981; and/or
(iii) the AAV capsid variant comprises an amino acid sequence comprising at least one, two or three, but not more than 30, 20 or 10 different amino acids, relative to the amino acid sequence of SEQ ID NO: 981;
(iv) the AAV capsid variant comprises an amino acid sequence encoded by the nucleotide sequence of SEQ ID NO: 983, or a nucleotide sequence with at least 95%, 96%, 97%, 98%, or 99% sequence identity thereto; and/or
(v) the nucleotide sequence encoding the AAV capsid variant comprises the nucleotide sequence of SEQ ID NO: 983, or a nucleotide sequence with at least 95%, 96%, 97%, 98%, or 99% sequence identity thereto, optionally wherein the nucleotide sequence is codon optimized.

19. The AAV particle of any one of claims 1-18, wherein the encoded antibody molecule binds domain I of HER2, domain II of HER2, domain III of HER2, and/or domain IV of HER2, optionally domain IV of HER2 or domain II HER2.

20. The AAV particle of any one of claims 1-19, wherein the encoded antibody molecule comprises:
(i) a heavy chain variable region comprising three HC CDR sequences of any of the HC CDR sequences of Table 3A-3C; and/or
(ii) a light chain variable region comprising three LC CDR sequences of any of the LC CDR sequences of Table 3A-3C;
optionally wherein one, two, three, four, five, or all of the HC CDR and LC CDR sequences comprise at least 1-4, e.g., at least one, two, three, or four, modifications, e.g., substitutions, relative to the HC CDR and LC CDR sequences provided in Tables 3A-3C.

21. The AAV particle of any one of claims 1-20, wherein the encoded antibody molecule comprises:
(a) the amino acid W at position 102, the amino acid F at position 107, the amino acid A position 108, and the amino acid L at position 109, relative to a reference sequence numbered according to the amino acid sequence of SEQ ID NO: 5001;
(b) the amino acid W at position 102, the amino acid F at position 107, and the amino acid A position 108, relative to a reference sequence numbered according to the amino acid sequence of SEQ ID NO: 5001;
(c) the amino acid W at position 102, the amino acid F at position 107, and the amino acid L at position 109, relative to a reference sequence numbered according to the amino acid sequence of SEQ ID NO: 5001;
(d) the amino acid W at position 102, the amino acid A position 108, and the amino acid L at position 109, relative to a reference sequence numbered according to the amino acid sequence of SEQ ID NO: 5001;
(e) the amino acid F at position 107, the amino acid A position 108, and the amino acid L at position 109, relative to a reference sequence numbered according to the amino acid sequence of SEQ ID NO: 5001.

22. The AAV particle of any one of claims 1-21, wherein the encoded antibody molecule comprises:
(i) a heavy chain variable region comprising a HC CDR1 amino acid sequence of SEQ ID NO: 5281, a HC CDR2 amino acid sequence of SEQ ID NO: 5282, and an HC CDR3 amino acid sequence of SEQ ID NO: 5283, 6510, 6515, 6520, 6525 or 6530; and/or a light chain variable region comprising an LC CDR1 amino acid sequence of SEQ ID NO: 5287, an LC CDR2 amino acid sequence of SEQ ID NO: 5288, and an LC CDR3 amino acid sequence of SEQ ID NO: 5289;
(ii) a heavy chain variable region comprising a HC CDR1 amino acid sequence of SEQ ID NO: 5284, a HC CDR2 amino acid sequence of SEQ ID NO: 5285, and an HC CDR3 amino acid sequence of SEQ ID NO: 5286; and/or a light chain variable region comprising an LC CDR1 amino acid sequence of SEQ ID NO: 5287, an LC CDR2 amino acid sequence of SEQ ID NO: 5291, and an LC CDR3 amino acid sequence of SEQ ID NO: 5292;
(iii) a HC CDR1, a HC CDR2, a HC CDR3, a LC CDR1, a LC CDR2 and an LC CDR3 comprising the amino acid sequences of SEQ ID NO: 5281, 5282, 6510, 5287, 5288, and 5289, respectively;
(iv) a HC CDR1, a HC CDR2, a HC CDR3, a LC CDR1, a LC CDR2 and an LC CDR3 comprising the amino acid sequences of SEQ ID NO: 5281, 5282, 6515, 5287, 5288, and 5289, respectively;
(v) a HC CDR1, a HC CDR2, a HC CDR3, a LC CDR1, a LC CDR2 and an LC CDR3 comprising the amino acid sequences of SEQ ID NO: 5281, 5282, 6530, 5287, 5288, and 5289, respectively; or
(vi) a HC CDR1, a HC CDR2, a HC CDR3, a LC CDR1, a LC CDR2 and an LC CDR3 comprising the amino acid sequences of SEQ ID NO: 5281, 5282, 6530, 5287, 5288, and 5289, respectively.

23. The AAV particle of any one the preceding claims wherein the encoded antibody molecule comprises:
(i) a heavy chain variable region (VH) comprising an amino acid sequence of any of the VH sequences of Table 3A-3C, or a sequence having at least 90%, 95%, 96%, 97%, 98%, or 99% sequence identity to any of the VH sequences of Table 3A-3C; and/or a light chain variable region (VL) comprising an amino acid sequence of any of the VL sequences of Table 3A-3C, or a sequence having at least 90%, 95%, 96%, 97%, 98%, or 99% sequence identity to any of the VL sequences of Table 3A-3C;
(ii) a VH comprising an amino acid selected from SEQ ID NO: 5001, 5367, 5172, 5106, 5010, 5069, 5192, 5224, 5090, 5110, 5254, 5258, 5130, 5262, 5270, 5326, 6511, 6516, 6521, 6526, 6531, 6536, 6539, 6542, 6545, or 6548, or a sequence at least about 90%, 92%, 95%, 97%, 98%, or 99% identical thereto;
(iii) a VH comprising the amino acid sequence of SEQ ID NO: 5270, 6511, 6516, 6521, 6526 or 6531, or a sequence at least about 90%, 92%, 95%, 97%, 98%, or 99% identical thereto; and/or a light chain variable region comprising the amino acid sequence of SEQ ID NO: 5274, or a sequence at least about 90%, 92%, 95%, 97%, 98%, or 99% identical thereto;
(iv) a VH comprising the amino acid sequence of SEQ ID NO: 5270, or a sequence at least about 90%, 92%, 95%, 97%, 98%, or 99% identical thereto; and/or a light chain variable region comprising the amino acid sequence of SEQ ID NO: 5274, or a sequence at least about 90%, 92%, 95%, 97%, 98%, or 99% identical thereto;
(v) a VH comprising the amino acid sequence of SEQ ID NO: 5016, or a sequence at least about 90%, 92%, 95%, 97%, 98%, or 99% identical thereto; and/or a light chain variable region comprising the amino acid sequence of SEQ ID NO: 5020, or a sequence at least about 90%, 92%, 95%, 97%, 98%, or 99% identical thereto; or
(vi) a VH comprising the amino acid sequence of SEQ ID NO: 5172, or a sequence at least about 90%, 92%, 95%, 97%, 98%, or 99% identical thereto; and/or a light chain variable region comprising the amino acid sequence of SEQ ID NO: 5176, or a sequence at least about 90%, 92%, 95%, 97%, 98%, or 99% identical thereto.

24. The AAV particle of any one of the preceding claims, wherein the encoded antibody molecule comprises:
(i) a heavy chain constant region comprising an amino acid sequence of any of the heavy chain constant region sequences of Table 3A-3C or 20, or a sequence having at least 80% (e.g., 85, 90, 95, 96, 97, 98, or 99%) sequence identity to the heavy chain constant region sequences of Table 3A-3C; and/or
(ii) a light chain constant region (CL) comprising an amino acid sequence of any of the CL sequences of Table 3A-3C or 20, or a sequence having at least 80% (e.g., 85, 90, 95, 96, 97, 98, or 99%) sequence identity to any of the CL sequences of Table 3A-3C.

25. The AAV particle of any one of the preceding claims wherein the encoded antibody molecule comprises:
(i) a heavy chain comprising an amino acid sequence of any of the heavy chain sequences of Table 3A-3C, or a sequence at least 90%, 95%, 96%, 97%, 98%, or 99% identical to any of the heavy chain sequences of Table 3A-3C; and/or a light chain comprising an amino acid sequence of any of the light chain sequences of Table 3A-3C, or a sequence at least 90%, 95%, 96%, 97%, 98%, or 99% identical to any of the light chain sequences of Table 3A-3C;
(ii) a heavy chain comprising the amino acid sequence of SEQ ID NO: 5272, 7589, 6513, 6518, 6523, 6528, 6533, or a sequence at least 90%, 95%, 96%, 97%, 98%, or 99% identical thereto; and/or a light chain comprising the amino acid sequence of SEQ ID NO: 5276 or a sequence at least 90%, 95%, 96%, 97%, 98%, or 99% identical thereto;
(ii) a heavy chain comprising the amino acid sequence of SEQ ID NO: 5272, or a sequence at 90%, 95%, 96%, 97%, 98%, or 99% identical thereto; and/or a light chain comprising the amino acid sequence of SEQ ID NO: 5276, or a sequence at 90%, 95%, 96%, 97%, 98%, or 99% identical thereto;
(iii) a heavy chain comprising the amino acid sequence of SEQ ID NO: 7589, or a sequence at 90%, 95%, 96%, 97%, 98%, or 99% identical thereto; and/or a light chain comprising the amino acid sequence of SEQ ID NO: 5276, or a sequence at 90%, 95%, 96%, 97%, 98%, or 99% identical thereto.

26. The AAV particle of any one of claims 1-25, wherein the encoded antibody molecule comprises an Fc region or functional variant thereof; or an scFv and an Fc region; optionally wherein the Fc region:
(i) has reduced affinity, e.g., ablated, affinity for an Fc receptor, e.g., as compared to a reference, wherein the reference is a wild-type Fc receptor;
(ii) comprises a mutation at one, two, or all of positions I253 (e.g., I253A), H310 (e.g., H310A or H310Q), and/or H435 (e.g., H435A or H435Q), according to EU numbering;
(iii) comprises a mutation at positions I253 (e.g., I253A), H310 (e.g., H310A or H310Q), and H435 (e.g., H435A or H435Q), according to EU numbering;
(iv) comprises one, two, or all of the mutations I253A, H310A, and/or H435A, according to EU numbering;
(v) comprises one, two, or all of A at position 253, A at position 310, and/or A at position 435, according to EU numbering;
(vi) comprises the mutations I253A, H310A, and H435A, according to EU numbering;
(vii) comprises A at position 253, A at position 310, and A at position 435, according to EU numbering;
(viii) has reduced effector function (e.g., reduced ADCC), compared to a reference wherein the reference is a wild-type Fc receptor;
(ix) comprises a mutation at one, two, three, four, or all of positions L235 (e.g., L235V), F243 (e.g., F243L), R292 (e.g., R292P), Y300 (e.g., Y300L), and/or P396 (e.g., P396L), numbered according to the EU index as in Kabat;
(x) comprises a mutation at positions L235 (e.g., L235V), F243 (e.g., F243L), R292 (e.g., R292P), Y300 (e.g., Y300L), and P396 (e.g., P396L), numbered according to the EU index as in Kabat;
(xi) comprises one, two, three, four, or all of the mutations L235V, F243L, R292P, Y300L, and/or P396L, numbered according to the EU index as in Kabat;
(xii) comprises one, two, three, four, or all of V at position 235, L at position 243, P at position 292, L at position 300, and/or L at position 396, numbered according to the EU index as in Kabat;
(xiii) comprises the mutations L235V, F243L, R292P, Y300L, and P396L, numbered according to the EU index as in Kabat;
(xiv) comprises V at position 235, L at position 243, P at position 292, L at position 300, and L at position 396, numbered according to the EU index as in Kabat;
(xv) comprises a mutation at L235 (e.g., L235V), F243 (e.g., F243L), R292 (e.g., R292P), Y300 (e.g., Y300L), P396 (e.g., P396L), I253 (e.g., I253A), H310 (e.g., H310A or H310Q), and H435 (e.g., H435A or H435Q), numbered according to the EU index as in Kabat;
(xvi) comprises the mutations L235V, F243L, R292P, Y300L, P396L, I253A, H310A, and H435A, numbered according to the EU index as in Kabat; or
(xvii) comprises V at position 235, L at position 243, P at position 292, L at position 300, L at position 396, A at position 253, A at position 310, and A at position 435, numbered according to the EU index as in Kabat.

27. The AAV particle of claim 25 or 26, wherein:
(i) the nucleotide sequence encoding the VH comprises any one of the nucleotide sequences encoding a VH of Table 3A-3C, or a sequence at least 90%, 95%, 96%, 97%, 98%, or 99% identical thereto; and/or the nucleotide sequence encoding the VL comprises any one of the nucleotide sequences encoding a VL of Table 3A-3C, or a sequence at least 90%, 95%, 96%, 97%, 98%, or 99% identical thereto;
(ii) the nucleotide sequence encoding the heavy chain comprises any one of the nucleotide sequences encoding a heavy chain of Table 3A-3C, or a sequence at least 90%, 95%, 96%, 97%, 98%, or 99% identical thereto; and/or the nucleotide sequence encoding the light chain comprises any one of the nucleotide sequences encoding a light chain of Table 3A-3C, or a sequence at least 90%, 95%, 96%, 97%, 98%, or 99% identical thereto;
(iii) the nucleotide sequence encoding the VH comprises SEQ ID NO: 5269, or a nucleotide sequence at least 90%, 95%, 96%, 97%, 98%, or 99% identical thereto; and/or the nucleotide sequence encoding the VL comprises the nucleotide sequence of SEQ ID NO: 5273 or 5245, or a nucleotide sequence at least 90%, 95%, 96%, 97%, 98%, or 99% identical thereto;
(iv) the nucleotide sequence encoding the VH comprises SEQ ID NO: 5109, or a nucleotide sequence at least 90%, 95%, 96%, 97%, 98%, or 99% identical thereto; and/or the nucleotide sequence encoding the VL comprises the nucleotide sequence of SEQ ID NO: 5113, or a nucleotide sequence at least 90%, 95%, 96%, 97%, 98%, or 99% identical thereto;
(v) the nucleotide sequence encoding the VH comprises SEQ ID NO: 5002, or a nucleotide sequence at least 90%, 95%, 96%, 97%, 98%, or 99% identical thereto; and/or the nucleotide sequence encoding the VL comprises the nucleotide sequence of SEQ ID NO: 5005, or a nucleotide sequence at least 90%, 95%, 96%, 97%, 98%, or 99% identical thereto;
(vi) the nucleotide sequence encoding the VH comprises SEQ ID NO: 5261, or a nucleotide sequence at least 90%, 95%, 96%, 97%, 98%, or 99% identical thereto; and/or the nucleotide sequence encoding the VL comprises the nucleotide sequence of SEQ ID NO: 5265, or a nucleotide sequence at least 90%, 95%, 96%, 97%, 98%, or 99% identical thereto;
(vii) the nucleotide sequence encoding the heavy chain comprises SEQ ID NO: 5271, 5244, or 7590, or a nucleotide sequence at least 90%, 95%, 96%, 97%, 98%, or 99% identical thereto; and/or the nucleotide sequence encoding the light chain comprises the nucleotide sequence of SEQ ID NO: 5275 or 5246, or a nucleotide sequence at least 90%, 95%, 96%, 97%, 98%, or 99% identical thereto;
(viii) the nucleotide sequence encoding the heavy chain comprises SEQ ID NO: 7590, or a nucleotide sequence at least 90%, 95%, 96%, 97%, 98%, or 99% identical thereto; and/or the nucleotide sequence encoding the light chain comprises the nucleotide sequence of SEQ ID NO: 5246, or a nucleotide sequence at least 90%, 95%, 96%, 97%, 98%, or 99% identical thereto;
(ix) the nucleotide sequence encoding the heavy chain comprises SEQ ID NO: 5271, or a nucleotide sequence at least 90%, 95%, 96%, 97%, 98%, or 99% identical thereto; and/or the nucleotide sequence encoding the light chain comprises the nucleotide sequence of SEQ ID NO: 5275, or a nucleotide sequence at least 90%, 95%, 96%, 97%, 98%, or 99% identical thereto; or
(x) the nucleotide sequence encoding the heavy chain comprises SEQ ID NO: 5244, or a nucleotide sequence at least 90%, 95%, 96%, 97%, 98%, or 99% identical thereto; and/or the nucleotide sequence encoding the light chain comprises the nucleotide sequence of SEQ ID NO: 5246, or a nucleotide sequence at least 90%, 95%, 96%, 97%, 98%, or 99% identical thereto.

28. The AAV particle of any one of claims 1-27, wherein the encoded antibody molecule is a full-length antibody, a bispecific antibody, a Fab, a F(ab′)2, a Fv, a single chain Fv fragment (scFv), single domain antibody, or a camelid antibody.

29. The AAV particle of any one of any one of claims 1-28, wherein the encoded antibody molecule is:
(i) a multispecific antibody molecule, e.g., a bispecific antibody molecule; and/or
(ii) a bispecific, e.g., biparatopic, antibody molecule;
optionally wherein the encoded bispecific, e.g., biparatopic, antibody molecule comprises at least two antigen binding domains for two different domains of HER2, further optionally wherein the encoded bispecific, e.g., biparatopic, antibody molecule comprises:
(a) a first antigen binding domain that binds domain I of HER2 and a second antigen binding domain that binds domain IV of HER2;
(b) a first antigen binding domain that binds domain II of HER2 and a second antigen binding domain that binds domain IV of HER2;
(c) a first antigen binding domain that binds domain III of HER2 and a second antigen binding domain that binds domain IV of HER2;
(d) a first antigen binding domain that binds domain I of HER2 and a second antigen binding domain that binds domain II of HER2;
(e) a first antigen binding domain that binds domain I of HER2 and a second antigen binding domain that binds domain III of HER2; or
(f) a first antigen binding domain that binds domain II of HER2 and a second antigen binding domain that binds domain III of HER2.

30. The AAV particle of any one of claims 20-29, wherein:
(i) the nucleic acid further encodes a signal sequence, optionally wherein the signal sequence comprises a nucleotide sequence of any of the signal sequences listed in Table 11A, or a nucleotide sequence with at least 95% sequence identity thereto, optionally wherein the nucleic acid encodes a first signal sequence present 5′ relative to the encoded VH and a second signal sequence present 5′ relative to the encoded VL;
(ii) the sequences of the encoded VH and VL are connected directly, e.g., without a linker;
(iii) the sequences of the encoded VH and VL are connected via a linker;
(iv) the sequences of the encoded heavy chain and light chain are connected directly, e.g., without a linker; or
(v) the sequences of the encoded heavy chain and light chain are connected via a linker.

31. The AAV particle of any one the preceding claims, further comprising a genetic element comprising a promoter operably linked to the nucleic acid encoding the antibody molecule.

32. The AAV particle of claim 31, wherein:
(i) the promoter is a ubiquitous promoter or a tissue specific promoter;
(ii) the promoter is chosen from human elongation factor 1α-subunit (EF1α), cytomegalovirus (CMV) immediate-early enhancer and/or promoter, chicken β-actin (CBA) and its derivative CAG, β glucuronidase (GUSB), or ubiquitin C (UBC), neuron-specific enolase (NSE), platelet-derived growth factor (PDGF), platelet-derived growth factor B-chain (PDGF-β), intercellular adhesion molecule 2 (ICAM-2), synapsin (Syn), methyl-CpG binding protein 2 (MeCP2), Ca2+/calmodulin-dependent protein kinase 11 (CaMKII), metabotropic glutamate receptor 2 (mGluR2), neurofilament light (NFL) or heavy (NFH), β-globin minigene nβ2, preproenkephalin (PPE), enkephalin (Enk) and excitatory amino acid transporter 2 (EAAT2), glial fibrillary acidic protein (GFAP), myelin basic protein (MBP), or a fragment, e.g., a truncation, or a functional variant thereof;
(iii) the promoter comprises a nucleotide sequence chosen from any one of SEQ ID NOs: 6563-6572, 6593-6594, or 4599, or a nucleotide sequence with at least 95% sequence identity thereto;
(iv) the promoter is a CBA promoter, optionally comprising the nucleotide sequence of SEQ ID NO: 6566 or a nucleotide sequence with at least 95% sequence identity thereto;
(v) the promoter is a GFAP promoter, optionally comprising the nucleotide sequence of SEQ ID NO: 6568, or a nucleotide sequence with at least 95% sequence identity thereto.

33. The AAV particle of claim 31 or 32, wherein the genetic element further comprises:
(i) an inverted terminal repeat (ITR) sequence, optionally wherein the ITR sequence is positioned 5′ relative to the encoded transgene and/or ITR sequence is positioned 3′ relative to the encoded transgene;
(ii) a polyadenylation (polyA) signal region, optionally wherein the polyA signal region comprises the nucleotide sequence of any of SEQ ID NOs: 6590-6592, or a nucleotide sequence with at least 95% sequence identity to any of SEQ ID NOs: 6590-6592;
(iii) an intron region, optionally wherein the intron region comprises a nucleotide sequence of any one of SEQ ID NOs: 6578-6588, 6595, 6607, 6608, or 6609, or a nucleotide sequence with at least 95% identity thereto;
(iv) an exon region, optionally wherein the exon region comprises a nucleotide sequence of any of SEQ ID NOs: 6573-6577, or a sequence with at least 95% sequence identity thereto;
(v) a Kozak sequence; and/or
(vi) a miR binding site, e.g., a miR binding site that modulates, e.g., reduces, expression of the antibody molecule encoded by the genetic element in a cell or tissue where the corresponding miRNA is expressed.

34. The AAV particle of any of one of claims 30-33, wherein the genetic element comprises the nucleotide sequence of any of SEQ ID NOs: 5163-5179 5185-5190, 5343, 5374, 5375, 6500, 6501, 6502, 6503, 6504, 6505, 6506, 6507, 6508, or 6509 or a sequence with at least 95% sequence identity thereto.

35. The AAV particle of any one of claims 30-34, wherein the genetic element further comprises a nucleic acid encoding the AAV capsid variant and/or a Rep protein, e.g., a non-structural protein, wherein the Rep protein comprises a Rep78 protein, a Rep68, Rep52 protein, and/or a Rep40 protein (e.g., a Rep52 protein and/or Rep78 protein), optionally wherein the Rep78 protein, the Rep68 protein, the Rep52 protein, and/or the Rep40 protein are encoded by at least one Rep gene.

36. A cell comprising the AAV particle of any one of claim 1-35.

37. A method of making the AAV particle of any one of claims 1-35, the method comprising
(i) providing a host cell a the genetic element; and
(ii) incubating the host cell under conditions suitable to enclose the genetic element in an AAV capsid variant;
thereby making the isolated AAV particle.

38. A pharmaceutical composition comprising an AAV particle of any one of claims 1-35, and a pharmaceutically acceptable excipient.

39. A method of delivering an exogenous antibody molecule that binds to HER2/neu, to a subject, comprising administering an effective amount of the AAV particle of any one of claims 1-35 or the pharmaceutical composition of claim 38.

40. The method of claim 39, wherein:
(i) the subject has, has been diagnosed with having, or is at risk of having a disease associated with expression of HER2/neu; and/or
(ii) the subject has, has been diagnosed with having, or is at risk of having a cancer expressing HER2/neu.

41. A method of treating a subject having or diagnosed with having cancer expressing HER2/neu, comprising administering to the subject an effective amount of the AAV particle of any one of claims 1-35 or the pharmaceutical composition of claim 38.

42. The method of claim 40 or 41, wherein the disease associated with HER2/neu expression is a HER2/neu-positive solid tumor, optionally wherein, the HER2/neu positive tumor is metastatic and/or has metastasized to the central nervous system (CNS).

43. The method of any one of claims 40-42, wherein the HER/neu positive cancer is breast cancer, gastric cancer, gastroesophageal junction cancer, colorectal cancer, lung cancer (e.g., non-small cell lung carcinoma), pancreatic cancer, bladder cancer, salivary duct cancer, ovarian cancer (e.g., epithelial ovarian cancer), endometrial cancer, prostate cancer, bone cancer and brain cancer.

44. The method of any one of claims 39-43, wherein the subject has:
(i) previously undergone localized therapy for a HER2/neu-positive solid tumor;
(ii) previously undergone surgical resection of a HER2/neu-positive solid tumor;
(iii) previously undergone radiotherapy for a HER2/neu-positive solid tumor; and/or
(iv) previously undergone immunotherapy and/or chemotherapy for a HER2/neu-positive solid tumor.

45. The method of any one of claims 39-44, wherein the AAV particle or pharmaceutical composition is administered to the subject intravenously, intramuscularly, intratumorally, intracerebrally, intrathecally, intracerebroventricularly, via intraparenchymal administration, via focused ultrasound (FUS), e.g., coupled with the intravenous administration of microbubbles (FUS-MB), or MRI-guided FUS coupled with intravenous administration, or via intra-cisterna magna injection (ICM).

46. The method of any one of claims 39-45, wherein the AAV particle or pharmaceutical composition is administered to the subject:
(i) prior to, concurrently with, or post a surgical resection of a HER2/neu-positive solid tumor;
(ii) to a site of surgical resection of a HER2/neu-positive solid tumor in the subject; and/or
(iii) to the area around a site of surgical resection of a HER2/neu-positive solid tumor, e.g., the margins of the tumor, in the subject.

47. The method of any one of claims 39-46, further comprising administration of an additional therapeutic agent and/or therapy suitable for treatment or prevention of a disorder associated with HER2/neu expression optionally wherein the additional therapeutic agent comprises:
(i) trastuzumab, pertuzumab, a chemotherapeutic agent, or a combination thereof;
(ii) trastuzumab emtansine; and/or
(iii) trastuzumab, tucatinib, capecitabine, Fam-trastuzumab deruxtecan-nxki, Lapatanib/capecitabine, Lapatanib, Margetuximab, a chemotherapeutic agent, Neratanib/capecitabine, or a combination thereof.

48. The AAV particle of any one of claims 1-35 or the pharmaceutical composition of claim 38, for use in the treatment of a disease associated with expression of HER2/neu or a cancer expressing HER2/neu.

49. Use of the AAV particle of any one of claims 1-35 or the pharmaceutical composition of claim 38, in the manufacture of a medicament.

50. Use of the AAV particle of any one of claims 1-35 or the pharmaceutical composition of claim 38, in the manufacture of a medicament in the manufacture of a medicament for treating a disease associated with expression of HER2/neu or a cancer expressing HER2/neu.

The application's sequence listing, which the Patent Office published only in electronic form, follows.

SEQUENCE LISTING (7593 sequences)

SEQ ID NO: 1 - protein, 743 aa, synthetic construct
MAADGYLPDWLEDNLSEGIREWWALKPGAPQPKANQQHQDNARGLVLPGYKYLGPGNGLDKGEPVNAADAAALEHDKAYDQQLKAGDNPYLKYNHADAEFQERLKEDTSFGGNLGRAVFQAKKRLLEPLGLVEEAAKTAPGKKRPVEQSPQEPDSSAGIGKSGAQPAKKRLNFGQTGDTESVPDPQPIGEPPAAPSGVGSLTMASGGGAPVADNNEGADGVGSSSGNWHCDSQWLGDRVITTSTRTWALPTYNNHLYKQISNSTSGGSSNDNAYFGYSTPWGYFDFNRFHCHFSPRDWQRLINNNWGFRPKRLNFKLFNIQVKEVTDNNGVKTIANNLTSTVQVFTDSDYQLPYVLGSAHEGCLPPFPADVFMIPQYGYLTLNDGSQAVGRSSFYCLEYFPSQMLRTGNNFQFSYEFENVPFHSSYAHSQSLDRLMNPLIDQYLYYLSKTINGSGQNQQTLKFSVAGPSNMAVQGRNYIPGPSYRQQRVSTTVTQNNNSEFAWPGASSWALNGRNSLMNPGPAMASHKEGEDRFFPLSGSLIFGKQGTGRDNVDADKVMITNEEEIKTTNPVATESYGQVATNHQSDGTLAVPFKAQAQTGWVQNQGILPGMVWQDRDVYLQGPIWAKIPHTDGNFHPSPLMGGFGMKHPPPQILIKNTPVPADPPTAFNKDKLNSFITQYSTGQVSVEIEWELQKENSKRWNPEIQYTSNYYKSNNVEFAVNTEGVYSEPRPIGTRYLTRNL

SEQ ID NO: 2 - protein, 6 aa, synthetic construct
HDSPHK

SEQ ID NO: 3 - DNA, 18 bp, synthetic construct
  source 1..18: mol_type = other DNA
cacgacagcccacacaaa

SEQ ID NO: 4-11 - skipped (8 entries)

SEQ ID NO: 12 - protein, 743 aa, synthetic construct
MAADGYLPDWLEDNLSEGIREWWALKPGAPQPKANQQHQDNARGLVLPGYKYLGPGNGLDKGEPVNAADAAALEHDKAYDQQLKAGDNPYLKYNHADAEFQERLKEDTSFGGNLGRAVFQAKKRLLEPLGLVEEAAKTAPGKKRPVEQSPQEPDSSAGIGKSGAQPAKKRLNFGQTGDTESVPDPQPIGEPPAAPSGVGSLTMASGGGAPVADNNEGADGVGSSSGNWHCDSQWLGDRVITTSTRTWALPTYNNHLYKQISNSTSGGSSNDNAYFGYSTPWGYFDFNRFHCHFSPRDWQRLINNNWGFRPKRLNFKLFNIQVKEVTDNNGVKTIANNLTSTVQVFTDSDYQLPYVLGSAHEGCLPPFPADVFMIPQYGYLTLNDGSQAVGRSSFYCLEYFPSQMLRTGNNFQFSYEFENVPFHSSYAHSQSLDRLMNPLIDQYLYYLSKTINGSGQNQQTLKFSVAGPSNMAVQGRNYIPGPSYRQQRVSTTVTQNNNSEFAWPGASSWALNGRNSLMNPGPAMASHKEGEDRFFPLSGSLIFGKQGTGRDNVDADKVMITNEEEIKTTNPVATESYGQVATNHQSDGTGSTTGWAQAQTGWVQNQGILPGMVWQDRDVYLQGPIWAKIPHTDGNFHPSPLMGGFGMKHPPPQILIKNTPVPADPPTAFNKDKLNSFITQYSTGQVSVEIEWELQKENSKRWNPEIQYTSNYYKSNNVEFAVNTEGVYSEPRPIGTRYLTRNL

SEQ ID NO: 13 - DNA, 2232 bp, synthetic construct
  source 1..2232: mol_type = other DNA
atggctgccgatggttatcttccagattggctcgaggacaaccttagtgaaggaattcgcgagtggtgggctttgaaacctggagcccctcaacccaaggcaaatcaacaacatcaagacaacgctcgaggtcttgtgcttccgggttacaaataccttggacccggcaacggactcgacaagggggagccggtcaacgcagcagacgcggcggccctcgagcacgacaaggcctacgaccagcagctcaaggccggagacaacccgtacctcaagtacaaccacgccgacgccgagttccaggagcggctcaaagaagatacgtcttttgggggcaacctcgggcgagcagtcttccaggccaaaaagaggcttcttgaacctcttggtctggttgaggaagcggctaagacggctcctggaaagaagaggcctgtagagcagtctcctcaggaaccggactcctccgcgggtattggcaaatcgggtgcacagcccgctaaaaagagactcaatttcggtcagactggcgacacagagtcagtcccagaccctcaaccaatcggagaacctcccgcagccccctcaggtgtgggatctcttacaatggcttcaggtggtggcgcaccagtggcagacaataacgaaggtgccgatggagtgggtagttcctcgggaaattggcattgcgattcccaatggctgggggacagagtcatcaccaccagcacccgaacctgggccctgcccacctacaacaatcacctctacaagcaaatctccaacagcacatctggaggatcttcaaatgacaacgcctacttcggctacagcaccccctgggggtattttgacttcaacagattccactgccacttctcaccacgtgactggcagcgactcatcaacaacaactggggattccggcctaagcgactcaacttcaagctcttcaacattcaggtcaaagaggttacggacaacaatggagtcaagaccatcgccaataaccttaccagcacggtccaggtcttcacggactcagactatcagctcccgtacgtgctcgggtcggctcacgagggctgcctcccgccgttcccagcggacgttttcatgattcctcagtacgggtatctgacgcttaatgatggaagccaggccgtgggtcgttcgtccttttactgcctggaatatttcccgtcgcaaatgctaagaacgggtaacaacttccagttcagctacgagtttgagaacgtacctttccatagcagctacgctcacagccaaagcctggaccgactaatgaatccactcatcgaccaatacttgtactatctctcaaagactattaacggttctggacagaatcaacaaacgctaaaattcagtgtggccggacccagcaacatggctgtccagggaagaaactacatacctggacccagctaccgacaacaacgtgtctcaaccactgtgactcaaaacaacaacagcgaatttgcttggcctggagcttcttcttgggctctcaatggacgtaatagcttgatgaatcctggacctgctatggccagccacaaagaaggagaggaccgtttctttcctttgtctggatctttaatttttggcaaacaaggaactggaagagacaacgtggatgcggacaaagtcatgataaccaacgaagaagaaattaaaactactaacccggtagcaacggagtcctatggacaagtggccacaaaccaccagagtgacggaacaggaagcacaacaggatgggcacaggcgcagaccggctgggttcaaaaccaaggaatacttccgggtatggtttggcaggacagagatgtgtacctgcaaggacccatttgggccaaaattcctcacacggacggcaactttcacccttctccgctgatgggagggtttggaatgaagcacccgcctcctcagatcctcatcaaaaacacacctgtacctgccgatcctccaacggccttcaacaaggacaagctgaactctttcatcacccagtattctactggccaagtcagcgtggagatcgagtgggagctgcagaaggaaaacagcaagcggtggaacccggagatccagtacacttccaactattacaagtctaataatgttgaatttgctgttaatactgaaggtgtatatagtgaaccccgccccattggcaccagatacctgactcgtaatctgtaa

SEQ ID NO: 14 - protein, 743 aa, synthetic construct
MAADGYLPDWLEDNLSEGIREWWALKPGAPQPKANQQHQDNARGLVLPGYKYLGPGNGLDKGEPVNAADAAALEHDKAYDQQLKAGDNPYLKYNHADAEFQERLKEDTSFGGNLGRAVFQAKKRLLEPLGLVEEAAKTAPGKKRPVEQSPQEPDSSAGIGKSGAQPAKKRLNFGQTGDTESVPDPQPIGEPPAAPSGVGSLTMASGGGAPVADNNEGADGVGSSSGNWHCDSQWLGDRVITTSTRTWALPTYNNHLYKQISNSTSGGSSNDNAYFGYSTPWGYFDFNRFHCHFSPRDWQRLINNNWGFRPKRLNFKLFNIQVKEVTDNNGVKTIANNLTSTVQVFTDSDYQLPYVLGSAHEGCLPPFPADVFMIPQYGYLTLNDGSQAVGRSSFYCLEYFPSQMLRTGNNFQFSYEFENVPFHSSYAHSQSLDRLMNPLIDQYLYYLSKTINGSGQNQQTLKFSVAGPSNMAVQGRNYIPGPSYRQQRVSTTVTQNNNSEFAWPGASSWALNGRNSLMNPGPAMASHKEGEDRFFPLSGSLIFGKQGTGRDNVDADKVMITNEEEIKTTNPVATESYGQVATNHQSDGTGQVTGWAQAQTGWVQNQGILPGMVWQDRDVYLQGPIWAKIPHTDGNFHPSPLMGGFGMKHPPPQILIKNTPVPADPPTAFNKDKLNSFITQYSTGQVSVEIEWELQKENSKRWNPEIQYTSNYYKSNNVEFAVNTEGVYSEPRPIGTRYLTRNL

SEQ ID NO: 15 - DNA, 2232 bp, synthetic construct
  source 1..2232: mol_type = other DNA
atggctgccgatggttatcttccagattggctcgaggacaaccttagtgaaggaattcgcgagtggtgggctttgaaacctggagcccctcaacccaaggcaaatcaacaacatcaagacaacgctcgaggtcttgtgcttccgggttacaaataccttggacccggcaacggactcgacaagggggagccggtcaacgcagcagacgcggcggccctcgagcacgacaaggcctacgaccagcagctcaaggccggagacaacccgtacctcaagtacaaccacgccgacgccgagttccaggagcggctcaaagaagatacgtcttttgggggcaacctcgggcgagcagtcttccaggccaaaaagaggcttcttgaacctcttggtctggttgaggaagcggctaagacggctcctggaaagaagaggcctgtagagcagtctcctcaggaaccggactcctccgcgggtattggcaaatcgggtgcacagcccgctaaaaagagactcaatttcggtcagactggcgacacagagtcagtcccagaccctcaaccaatcggagaacctcccgcagccccctcaggtgtgggatctcttacaatggcttcaggtggtggcgcaccagtggcagacaataacgaaggtgccgatggagtgggtagttcctcgggaaattggcattgcgattcccaatggctgggggacagagtcatcaccaccagcacccgaacctgggccctgcccacctacaacaatcacctctacaagcaaatctccaacagcacatctggaggatcttcaaatgacaacgcctacttcggctacagcaccccctgggggtattttgacttcaacagattccactgccacttctcaccacgtgactggcagcgactcatcaacaacaactggggattccggcctaagcgactcaacttcaagctcttcaacattcaggtcaaagaggttacggacaacaatggagtcaagaccatcgccaataaccttaccagcacggtccaggtcttcacggactcagactatcagctcccgtacgtgctcgggtcggctcacgagggctgcctcccgccgttcccagcggacgttttcatgattcctcagtacgggtatctgacgcttaatgatggaagccaggccgtgggtcgttcgtccttttactgcctggaatatttcccgtcgcaaatgctaagaacgggtaacaacttccagttcagctacgagtttgagaacgtacctttccatagcagctacgctcacagccaaagcctggaccgactaatgaatccactcatcgaccaatacttgtactatctctcaaagactattaacggttctggacagaatcaacaaacgctaaaattcagtgtggccggacccagcaacatggctgtccagggaagaaactacatacctggacccagctaccgacaacaacgtgtctcaaccactgtgactcaaaacaacaacagcgaatttgcttggcctggagcttcttcttgggctctcaatggacgtaatagcttgatgaatcctggacctgctatggccagccacaaagaaggagaggaccgtttctttcctttgtctggatctttaatttttggcaaacaaggaactggaagagacaacgtggatgcggacaaagtcatgataaccaacgaagaagaaattaaaactactaacccggtagcaacggagtcctatggacaagtggccacaaaccaccagagtgacggaacaggacaagtcacaggatgggcacaggcgcagaccggctgggttcaaaaccaaggaatacttccgggtatggtttggcaggacagagatgtgtacctgcaaggacccatttgggccaaaattcctcacacggacggcaactttcacccttctccgctgatgggagggtttggaatgaagcacccgcctcctcagatcctcatcaaaaacacacctgtacctgccgatcctccaacggccttcaacaaggacaagctgaactctttcatcacccagtattctactggccaagtcagcgtggagatcgagtgggagctgcagaaggaaaacagcaagcggtggaacccggagatccagtacacttccaactattacaagtctaataatgttgaatttgctgttaatactgaaggtgtatatagtgaaccccgccccattggcaccagatacctgactcgtaatctgtaa

SEQ ID NO: 16 - DNA, 2226 bp, synthetic construct
  source 1..2226: mol_type = other DNA
atggctgccgatggttatcttccagattggctcgaggacaaccttagtgaaggaattcgcgagtggtgggctttgaaacctggagcccctcaacccaaggcaaatcaacaacatcaagacaacgctcgaggtcttgtgcttccgggttacaaataccttggacccggcaacggactcgacaagggggagccggtcaacgcagcagacgcggcggccctcgagcacgacaaggcctacgaccagcagctcaaggccggagacaacccgtacctcaagtacaaccacgccgacgccgagttccaggagcggctcaaagaagatacgtcttttgggggcaacctcgggcgagcagtcttccaggccaaaaagaggcttcttgaacctcttggtctggttgaggaagcggctaagacggctcctggaaagaagaggcctgtagagcagtctcctcaggaaccggactcctccgcgggtattggcaaatcgggtgcacagcccgctaaaaagagactcaatttcggtcagactggcgacacagagtcagtcccagaccctcaaccaatcggagaacctcccgcagccccctcaggtgtgggatctcttacaatggcttcaggtggtggcgcaccagtggcagacaataacgaaggtgccgatggagtgggtagttcctcgggaaattggcattgcgattcccaatggctgggggacagagtcatcaccaccagcacccgaacctgggccctgcccacctacaacaatcacctctacaagcaaatctccaacagcacatctggaggatcttcaaatgacaacgcctacttcggctacagcaccccctgggggtattttgacttcaacagattccactgccacttctcaccacgtgactggcagcgactcatcaacaacaactggggattccggcctaagcgactcaacttcaagctcttcaacattcaggtcaaagaggttacggacaacaatggagtcaagaccatcgccaataaccttaccagcacggtccaggtcttcacggactcagactatcagctcccgtacgtgctcgggtcggctcacgagggctgcctcccgccgttcccagcggacgttttcatgattcctcagtacgggtatctgacgcttaatgatggaagccaggccgtgggtcgttcgtccttttactgcctggaatatttcccgtcgcaaatgctaagaacgggtaacaacttccagttcagctacgagtttgagaacgtacctttccatagcagctacgctcacagccaaagcctggaccgactaatgaatccactcatcgatcagtatctgtattacttgagtaaggagattaatggtcgtggttctccgcattctaaggcgcagaatcagcagacgttgaagttttcggtagctggtcctagcaacatggctgtccagggaagaaactacatacctggacccagctaccgacaacaacgtgtctcaaccactgtgactcaaaacaacaacagcgaatttgcttggcctggagcttcttcttgggctctcaatggacgtaatagcttgatgaatcctggacctgctatggccagccacaaagaaggagaggaccgtttctttcctttgtctggatctttaatttttggcaaacaaggaactggaagagacaacgtggatgcggacaaagtcatgataaccaacgaagaagaaattaaaactactaacccggtagcaacggagtcctatggacaagtggccacaaaccaccagagtgcccaagcacaggcgcagaccggctgggttcaaaaccaaggaatacttccgggtatggtttggcaggacagagatgtgtacctgcaaggacccatttgggccaaaattcctcacacggacggcaactttcacccttctccgctgatgggagggtttggaatgaagcacccgcctcctcagatcctcatcaaaaacacacctgtacctgcggatcctccaacggccttcaacaaggacaagctgaactctttcatcacccagtattctactggccaagtcagcgtggagatcgagtgggagctgcagaaggaaaacagcaagcgctggaacccggagatccagtacacttccaactattacaagtctaataatgttgaatttgctgttaatactgaaggtgtatatagtgaaccccgccccattggcacgcggtatttaacgaggaactta

SEQ ID NO: 17 - DNA, 2226 bp, synthetic construct
  source 1..2226: mol_type = other DNA
atggctgccgatggttatcttccagattggctcgaggacaaccttagtgaaggaattcgcgagtggtgggctttgaaacctggagcccctcaacccaaggcaaatcaacaacatcaagacaacgctcgaggtcttgtgcttccgggttacaaataccttggacccggcaacggactcgacaagggggagccggtcaacgcagcagacgcggcggccctcgagcacgacaaggcctacgaccagcagctcaaggccggagacaacccgtacctcaagtacaaccacgccgacgccgagttccaggagcggctcaaagaagatacgtcttttgggggcaacctcgggcgagcagtcttccaggccaaaaagaggcttcttgaacctcttggtctggttgaggaagcggctaagacggctcctggaaagaagaggcctgtagagcagtctcctcaggaaccggactcctccgcgggtattggcaaatcgggtgcacagcccgctaaaaagagactcaatttcggtcagactggcgacacagagtcagtcccagaccctcaaccaatcggagaacctcccgcagccccctcaggtgtgggatctcttacaatggcttcaggtggtggcgcaccagtggcagacaataacgaaggtgccgatggagtgggtagttcctcgggaaattggcattgcgattcccaatggctgggggacagagtcatcaccaccagcacccgaacctgggccctgcccacctacaacaatcacctctacaagcaaatctccaacagcacatctggaggatcttcaaatgacaacgcctacttcggctacagcaccccctgggggtattttgacttcaacagattccactgccacttctcaccacgtgactggcagcgactcatcaacaacaactggggattccggcctaagcgactcaacttcaagctcttcaacattcaggtcaaagaggttacggacaacaatggagtcaagaccatcgccaataaccttaccagcacggtccaggtcttcacggactcagactatcagctcccgtacgtgctcgggtcggctcacgagggctgcctcccgccgttcccagcggacgttttcatgattcctcagtacgggtatctgacgcttaatgatggaagccaggccgtgggtcgttcgtccttttactgcctggaatatttcccgtcgcaaatgctaagaacgggtaacaacttccagttcagctacgagtttgagaacgtacctttccatagcagctacgctcacagccaaagcctggaccgactaatgaatccactcatcgatcagtatctgtattacttgagtaagacgtttaatggttctggttctccgcattctaaggcgccgaatctgcagacgttgaagttttcggtagctggtcctagcaacatggctgtccagggaagaaactacatacctggacccagctaccgacaacaacgtgtctcaaccactgtgactcaaaacaacaacagcgaatttgcttggcctggagcttcttcttgggctctcaatggacgtaatagcttgatgaatcctggacctgctatggccagccacaaagaaggagaggaccgtttctttcctttgtctggatctttaatttttggcaaacaaggaactggaagagacaacgtggatgcggacaaagtcatgataaccaacgaagaagaaattaaaactactaacccggtagcaacggagtcctatggacaagtggccacaaaccaccagagtgcccaagcacaggcgcagaccggctgggttcaaaaccaaggaatacttccgggtatggtttggcaggacagagatgtgtacctgcaaggacccatttgggccaaaattcctcacacggacggcaactttcacccttctccgctgatgggagggtttggaatgaagcacccgcctcctcagatcctcatcaaaaacacacctgtacctgcggatcctccaacggccttcaacaaggacaagctgaactctttcatcacccagtattctactggccaagtcagcgtggagatcgagtgggagctgcagaaggaaaacagcaagcgctggaacccggagatccagtacacttccaactattacaagtctaataatgttgaatttgctgttaatactgaaggtgtatatagtgaaccccgccccattggcacgcggtatttaacgaggaactta

SEQ ID NO: 18 - DNA, 2226 bp, synthetic construct
  source 1..2226: mol_type = other DNA
atggctgccgatggttatcttccagattggctcgaggacaaccttagtgaaggaattcgcgagtggtgggctttgaaacctggagcccctcaacccaaggcaaatcaacaacatcaagacaacgctcgaggtcttgtgcttccgggttacaaataccttggacccggcaacggactcgacaagggggagccggtcaacgcagcagacgcggcggccctcgagcacgacaaggcctacgaccagcagctcaaggccggagacaacccgtacctcaagtacaaccacgccgacgccgagttccaggagcggctcaaagaagatacgtcttttgggggcaacctcgggcgagcagtcttccaggccaaaaagaggcttcttgaacctcttggtctggttgaggaagcggctaagacggctcctggaaagaagaggcctgtagagcagtctcctcaggaaccggactcctccgcgggtattggcaaatcgggtgcacagcccgctaaaaagagactcaatttcggtcagactggcgacacagagtcagtcccagaccctcaaccaatcggagaacctcccgcagccccctcaggtgtgggatctcttacaatggcttcaggtggtggcgcaccagtggcagacaataacgaaggtgccgatggagtgggtagttcctcgggaaattggcattgcgattcccaatggctgggggacagagtcatcaccaccagcacccgaacctgggccctgcccacctacaacaatcacctctacaagcaaatctccaacagcacatctggaggatcttcaaatgacaacgcctacttcggctacagcaccccctgggggtattttgacttcaacagattccactgccacttctcaccacgtgactggcagcgactcatcaacaacaactggggattccggcctaagcgactcaacttcaagctcttcaacattcaggtcaaagaggttacggacaacaatggagtcaagaccatcgccaataaccttaccagcacggtccaggtcttcacggactcagactatcagctcccgtacgtgctcgggtcggctcacgagggctgcctcccgccgttcccagcggacgttttcatgattcctcagtacgggtatctgacgcttaatgatggaagccaggccgtgggtcgttcgtccttttactgcctggaatatttcccgtcgcaaatgctaagaacgggtaacaacttccagttcagctacgagtttgagaacgtacctttccatagcagctacgctcacagccaaagcctggaccgactaatgaatccactcatcgatcagtatctgtattacttgagtaagacggagaagacgtctggttctccgcattctaaggcgcagaatcagcagacgttgaagttttcggtagctggtcctagcaacatggctgtccagggaagaaactacatacctggacccagctaccgacaacaacgtgtctcaaccactgtgactcaaaacaacaacagcgaatttgcttggcctggagcttcttcttgggctctcaatggacgtaatagcttgatgaatcctggacctgctatggccagccacaaagaaggagaggaccgtttctttcctttgtctggatctttaatttttggcaaacaaggaactggaagagacaacgtggatgcggacaaagtcatgataaccaacgaagaagaaattaaaactactaacccggtagcaacggagtcctatggacaagtggccacaaaccaccagagtgcccaagcacaggcgcagaccggctgggttcaaaaccaaggaatacttccgggtatggtttggcaggacagagatgtgtacctgcaaggacccatttgggccaaaattcctcacacggacggcaactttcacccttctccgctgatgggagggtttggaatgaagcacccgcctcctcagatcctcatcaaaaacacacctgtacctgcggatcctccaacggccttcaacaaggacaagctgaactctttcatcacccagtattctactggccaagtcagcgtggagatcgagtgggagctgcagaaggaaaacagcaagcgctggaacccggagatccagtacacttccaactattacaagtctaataatgttgaatttgctgttaatactgaaggtgtatatagtgaaccccgccccattggcacgcggtatttaacgaggaactta

SEQ ID NO: 19 - DNA, 2226 bp, synthetic construct
  source 1..2226: mol_type = other DNA
atggctgccgatggttatcttccagattggctcgaggacaaccttagtgaaggaattcgcgagtggtgggctttgaaacctggagcccctcaacccaaggcaaatcaacaacatcaagacaacgctcgaggtcttgtgcttccgggttacaaataccttggacccggcaacggactcgacaagggggagccggtcaacgcagcagacgcggcggccctcgagcacgacaaggcctacgaccagcagctcaaggccggagacaacccgtacctcaagtacaaccacgccgacgccgagttccaggagcggctcaaagaagatacgtcttttgggggcaacctcgggcgagcagtcttccaggccaaaaagaggcttcttgaacctcttggtctggttgaggaagcggctaagacggctcctggaaagaagaggcctgtagagcagtctcctcaggaaccggactcctccgcgggtattggcaaatcgggtgcacagcccgctaaaaagagactcaatttcggtcagactggcgacacagagtcagtcccagaccctcaaccaatcggagaacctcccgcagccccctcaggtgtgggatctcttacaatggcttcaggtggtggcgcaccagtggcagacaataacgaaggtgccgatggagtgggtagttcctcgggaaattggcattgcgattcccaatggctgggggacagagtcatcaccaccagcacccgaacctgggccctgcccacctacaacaatcacctctacaagcaaatctccaacagcacatctggaggatcttcaaatgacaacgcctacttcggctacagcaccccctgggggtattttgacttcaacagattccactgccacttctcaccacgtgactggcagcgactcatcaacaacaactggggattccggcctaagcgactcaacttcaagctcttcaacattcaggtcaaagaggttacggacaacaatggagtcaagaccatcgccaataaccttaccagcacggtccaggtcttcacggactcagactatcagctcccgtacgtgctcgggtcggctcacgagggctgcctcccgccgttcccagcggacgttttcatgattcctcagtacgggtatctgacgcttaatgatggaagccaggccgtgggtcgttcgtccttttactgcctggaatatttcccgtcgcaaatgctaagaacgggtaacaacttccagttcagctacgagtttgagaacgtacctttccatagcagctacgctcacagccaaagcctggaccgactaatgaatccactcatcgatcagtatctgtattacttgagtaagacgatgaatggtcatgattctccgcattctaaggcgcagaatcagcagacgttgaagttttcggtagctggtcctagcaacatggctgtccagggaagaaactacatacctggacccagctaccgacaacaacgtgtctcaaccactgtgactcaaaacaacaacagcgaatttgcttggcctggagcttcttcttgggctctcaatggacgtaatagcttgatgaatcctggacctgctatggccagccacaaagaaggagaggaccgtttctttcctttgtctggatctttaatttttggcaaacaaggaactggaagagacaacgtggatgcggacaaagtcatgataaccaacgaagaagaaattaaaactactaacccggtagcaacggagtcctatggacaagtggccacaaaccaccagagtgcccaagcacaggcgcagaccggctgggttcaaaaccaaggaatacttccgggtatggtttggcaggacagagatgtgtacctgcaaggacccatttgggccaaaattcctcacacggacggcaactttcacccttctccgctgatgggagggtttggaatgaagcacccgcctcctcagatcctcatcaaaaacacacctgtacctgcggatcctccaacggccttcaacaaggacaagctgaactctttcatcacccagtattctactggccaagtcagcgtggagatcgagtgggagctgcagaaggaaaacagcaagcgctggaacccggagatccagtacacttccaactattacaagtctaataatgttgaatttgctgttaatactgaaggtgtatatagtgaaccccgccccattggcacgcggtatttaacgaggaactta

SEQ ID NO: 20 - DNA, 2226 bp, synthetic construct
  source 1..2226: mol_type = other DNA
atggctgccgatggttatcttccagattggctcgaggacaaccttagtgaaggaattcgcgagtggtgggctttgaaacctggagcccctcaacccaaggcaaatcaacaacatcaagacaacgctcgaggtcttgtgcttccgggttacaaataccttggacccggcaacggactcgacaagggggagccggtcaacgcagcagacgcggcggccctcgagcacgacaaggcctacgaccagcagctcaaggccggagacaacccgtacctcaagtacaaccacgccgacgccgagttccaggagcggctcaaagaagatacgtcttttgggggcaacctcgggcgagcagtcttccaggccaaaaagaggcttcttgaacctcttggtctggttgaggaagcggctaagacggctcctggaaagaagaggcctgtagagcagtctcctcaggaaccggactcctccgcgggtattggcaaatcgggtgcacagcccgctaaaaagagactcaatttcggtcagactggcgacacagagtcagtcccagaccctcaaccaatcggagaacctcccgcagccccctcaggtgtgggatctcttacaatggcttcaggtggtggcgcaccagtggcagacaataacgaaggtgccgatggagtgggtagttcctcgggaaattggcattgcgattcccaatggctgggggacagagtcatcaccaccagcacccgaacctgggccctgcccacctacaacaatcacctctacaagcaaatctccaacagcacatctggaggatcttcaaatgacaacgcctacttcggctacagcaccccctgggggtattttgacttcaacagattccactgccacttctcaccacgtgactggcagcgactcatcaacaacaactggggattccggcctaagcgactcaacttcaagctcttcaacattcaggtcaaagaggttacggacaacaatggagtcaagaccatcgccaataaccttaccagcacggtccaggtcttcacggactcagactatcagctcccgtacgtgctcgggtcggctcacgagggctgcctcccgccgttcccagcggacgttttcatgattcctcagtacgggtatctgacgcttaatgatggaagccaggccgtgggtcgttcgtccttttactgcctggaatatttcccgtcgcaaatgctaagaacgggtaacaacttccagttcagctacgagtttgagaacgtacctttccatagcagctacgctcacagccaaagcctggaccgactaatgaatccactcatcgatcagtatctgtattacttgagtaagacgattgatggtcatgattctccgcattctaaggcgcagaatcagcagacgttgaagttttcggtagctggtcctagcaacatggctgtccagggaagaaactacatacctggacccagctaccgacaacaacgtgtctcaaccactgtgactcaaaacaacaacagcgaatttgcttggcctggagcttcttcttgggctctcaatggacgtaatagcttgatgaatcctggacctgctatggccagccacaaagaaggagaggaccgtttctttcctttgtctggatctttaatttttggcaaacaaggaactggaagagacaacgtggatgcggacaaagtcatgataaccaacgaagaagaaattaaaactactaacccggtagcaacggagtcctatggacaagtggccacaaaccaccagagtgcccaagcacaggcgcagaccggctgggttcaaaaccaaggaatacttccgggtatggtttggcaggacagagatgtgtacctgcaaggacccatttgggccaaaattcctcacacggacggcaactttcacccttctccgctgatgggagggtttggaatgaagcacccgcctcctcagatcctcatcaaaaacacacctgtacctgcggatcctccaacggccttcaacaaggacaagctgaactctttcatcacccagtattctactggccaagtcagcgtggagatcgagtgggagctgcagaaggaaaacagcaagcgctggaacccggagatccagtacacttccaactattacaagtctaataatgttgaatttgctgttaatactgaaggtgtatatagtgaaccccgccccattggcacgcggtatttaacgaggaactta

SEQ ID NO: 21 - DNA, 2226 bp, synthetic construct
  source 1..2226: mol_type = other DNA
atggctgccgatggttatcttccagattggctcgaggacaaccttagtgaaggaattcgcgagtggtgggctttgaaacctggagcccctcaacccaaggcaaatcaacaacatcaagacaacgctcgaggtcttgtgcttccgggttacaaataccttggacccggcaacggactcgacaagggggagccggtcaacgcagcagacgcggcggccctcgagcacgacaaggcctacgaccagcagctcaaggccggagacaacccgtacctcaagtacaaccacgccgacgccgagttccaggagcggctcaaagaagatacgtcttttgggggcaacctcgggcgagcagtcttccaggccaaaaagaggcttcttgaacctcttggtctggttgaggaagcggctaagacggctcctggaaagaagaggcctgtagagcagtctcctcaggaaccggactcctccgcgggtattggcaaatcgggtgcacagcccgctaaaaagagactcaatttcggtcagactggcgacacagagtcagtcccagaccctcaaccaatcggagaacctcccgcagccccctcaggtgtgggatctcttacaatggcttcaggtggtggcgcaccagtggcagacaataacgaaggtgccgatggagtgggtagttcctcgggaaattggcattgcgattcccaatggctgggggacagagtcatcaccaccagcacccgaacctgggccctgcccacctacaacaatcacctctacaagcaaatctccaacagcacatctggaggatcttcaaatgacaacgcctacttcggctacagcaccccctgggggtattttgacttcaacagattccactgccacttctcaccacgtgactggcagcgactcatcaacaacaactggggattccggcctaagcgactcaacttcaagctcttcaacattcaggtcaaagaggttacggacaacaatggagtcaagaccatcgccaataaccttaccagcacggtccaggtcttcacggactcagactatcagctcccgtacgtgctcgggtcggctcacgagggctgcctcccgccgttcccagcggacgttttcatgattcctcagtacgggtatctgacgcttaatgatggaagccaggccgtgggtcgttcgtccttttactgcctggaatatttcccgtcgcaaatgctaagaacgggtaacaacttccagttcagctacgagtttgagaacgtacctttccatagcagctacgctcacagccaaagcctggaccgactaatgaatccactcatcgatcagtatctgtattacttgagtaagacgaataatggtcatgattctccgcattctaaggcgcagaatcagcagacgttgaagttttcggtagctggtcctagcaacatggctgtccagggaagaaactacatacctggacccagctaccgacaacaacgtgtctcaaccactgtgactcaaaacaacaacagcgaatttgcttggcctggagcttcttcttgggctctcaatggacgtaatagcttgatgaatcctggacctgctatggccagccacaaagaaggagaggaccgtttctttcctttgtctggatctttaatttttggcaaacaaggaactggaagagacaacgtggatgcggacaaagtcatgataaccaacgaagaagaaattaaaactactaacccggtagcaacggagtcctatggacaagtggccacaaaccaccagagtgcccaagcacaggcgcagaccggctgggttcaaaaccaaggaatacttccgggtatggtttggcaggacagagatgtgtacctgcaaggacccatttgggccaaaattcctcacacggacggcaactttcacccttctccgctgatgggagggtttggaatgaagcacccgcctcctcagatcctcatcaaaaacacacctgtacctgcggatcctccaacggccttcaacaaggacaagctgaactctttcatcacccagtattctactggccaagtcagcgtggagatcgagtgggagctgcagaaggaaaacagcaagcgctggaacccggagatccagtacacttccaactattacaagtctaataatgttgaatttgctgttaatactgaaggtgtatatagtgaaccccgccccattggcacgcggtatttaacgaggaactta

SEQ ID NO: 22 - DNA, 2226 bp, synthetic construct
  source 1..2226: mol_type = other DNA
atggctgccgatggttatcttccagattggctcgaggacaaccttagtgaaggaattcgcgagtggtgggctttgaaacctggagcccctcaacccaaggcaaatcaacaacatcaagacaacgctcgaggtcttgtgcttccgggttacaaataccttggacccggcaacggactcgacaagggggagccggtcaacgcagcagacgcggcggccctcgagcacgacaaggcctacgaccagcagctcaaggccggagacaacccgtacctcaagtacaaccacgccgacgccgagttccaggagcggctcaaagaagatacgtcttttgggggcaacctcgggcgagcagtcttccaggccaaaaagaggcttcttgaacctcttggtctggttgaggaagcggctaagacggctcctggaaagaagaggcctgtagagcagtctcctcaggaaccggactcctccgcgggtattggcaaatcgggtgcacagcccgctaaaaagagactcaatttcggtcagactggcgacacagagtcagtcccagaccctcaaccaatcggagaacctcccgcagccccctcaggtgtgggatctcttacaatggcttcaggtggtggcgcaccagtggcagacaataacgaaggtgccgatggagtgggtagttcctcgggaaattggcattgcgattcccaatggctgggggacagagtcatcaccaccagcacccgaacctgggccctgcccacctacaacaatcacctctacaagcaaatctccaacagcacatctggaggatcttcaaatgacaacgcctacttcggctacagcaccccctgggggtattttgacttcaacagattccactgccacttctcaccacgtgactggcagcgactcatcaacaacaactggggattccggcctaagcgactcaacttcaagctcttcaacattcaggtcaaagaggttacggacaacaatggagtcaagaccatcgccaataaccttaccagcacggtccaggtcttcacggactcagactatcagctcccgtacgtgctcgggtcggctcacgagggctgcctcccgccgttcccagcggacgttttcatgattcctcagtacgggtatctgacgcttaatgatggaagccaggccgtgggtcgttcgtccttttactgcctggaatatttcccgtcgcaaatgctaagaacgggtaacaacttccagttcagctacgagtttgagaacgtacctttccatagcagctacgctcacagccaaagcctggaccgactaatgaatccactcatcgatcagtatctgtattacttgagtaagacgcagcgtaagtctggttctccgcattctaaggcgcagaatcagcagacgttgaagttttcggtagctggtcctagcaacatggctgtccagggaagaaactacatacctggacccagctaccgacaacaacgtgtctcaaccactgtgactcaaaacaacaacagcgaatttgcttggcctggagcttcttcttgggctctcaatggacgtaatagcttgatgaatcctggacctgctatggccagccacaaagaaggagaggaccgtttctttcctttgtctggatctttaatttttggcaaacaaggaactggaagagacaacgtggatgcggacaaagtcatgataaccaacgaagaagaaattaaaactactaacccggtagcaacggagtcctatggacaagtggccacaaaccaccagagtgcccaagcacaggcgcagaccggctgggttcaaaaccaaggaatacttccgggtatggtttggcaggacagagatgtgtacctgcaaggacccatttgggccaaaattcctcacacggacggcaactttcacccttctccgctgatgggagggtttggaatgaagcacccgcctcctcagatcctcatcaaaaacacacctgtacctgcggatcctccaacggccttcaacaaggacaagctgaactctttcatcacccagtattctactggccaagtcagcgtggagatcgagtgggagctgcagaaggaaaacagcaagcgctggaacccggagatccagtacacttccaactattacaagtctaataatgttgaatttgctgttaatactgaaggtgtatatagtgaaccccgccccattggcacgcggtatttaacgaggaactta

SEQ ID NO: 23 - DNA, 2226 bp, synthetic construct
  source 1..2226: mol_type = other DNA
atggctgccgatggttatcttccagattggctcgaggacaaccttagtgaaggaattcgcgagtggtgggctttgaaacctggagcccctcaacccaaggcaaatcaacaacatcaagacaacgctcgaggtcttgtgcttccgggttacaaataccttggacccggcaacggactcgacaagggggagccggtcaacgcagcagacgcggcggccctcgagcacgacaaggcctacgaccagcagctcaaggccggagacaacccgtacctcaagtacaaccacgccgacgccgagttccaggagcggctcaaagaagatacgtcttttgggggcaacctcgggcgagcagtcttccaggccaaaaagaggcttcttgaacctcttggtctggttgaggaagcggctaagacggctcctggaaagaagaggcctgtagagcagtctcctcaggaaccggactcctccgcgggtattggcaaatcgggtgcacagcccgctaaaaagagactcaatttcggtcagactggcgacacagagtcagtcccagaccctcaaccaatcggagaacctcccgcagccccctcaggtgtgggatctcttacaatggcttcaggtggtggcgcaccagtggcagacaataacgaaggtgccgatggagtgggtagttcctcgggaaattggcattgcgattcccaatggctgggggacagagtcatcaccaccagcacccgaacctgggccctgcccacctacaacaatcacctctacaagcaaatctccaacagcacatctggaggatcttcaaatgacaacgcctacttcggctacagcaccccctgggggtattttgacttcaacagattccactgccacttctcaccacgtgactggcagcgactcatcaacaacaactggggattccggcctaagcgactcaacttcaagctcttcaacattcaggtcaaagaggttacggacaacaatggagtcaagaccatcgccaataaccttaccagcacggtccaggtcttcacggactcagactatcagctcccgtacgtgctcgggtcggctcacgagggctgcctcccgccgttcccagcggacgttttcatgattcctcagtacgggtatctgacgcttaatgatggaagccaggccgtgggtcgttcgtccttttactgcctggaatatttcccgtcgcaaatgctaagaacgggtaacaacttccagttcagctacgagtttgagaacgtacctttccatagcagctacgctcacagccaaagcctggaccgactaatgaatccactcatcgatcagtatctgtattacttgagtaagacgattaatggttctggttctccgcattctaaggcgcaggcgcgtaagacgttgaagttttcggtagctggtcctagcaacatggctgtccagggaagaaactacatacctggacccagctaccgacaacaacgtgtctcaaccactgtgactcaaaacaacaacagcgaatttgcttggcctggagcttcttcttgggctctcaatggacgtaatagcttgatgaatcctggacctgctatggccagccacaaagaaggagaggaccgtttctttcctttgtctggatctttaatttttggcaaacaaggaactggaagagacaacgtggatgcggacaaagtcatgataaccaacgaagaagaaattaaaactactaacccggtagcaacggagtcctatggacaagtggccacaaaccaccagagtgcccaagcacaggcgcagaccggctgggttcaaaaccaaggaatacttccgggtatggtttggcaggacagagatgtgtacctgcaaggacccatttgggccaaaattcctcacacggacggcaactttcacccttctccgctgatgggagggtttggaatgaagcacccgcctcctcagatcctcatcaaaaacacacctgtacctgcggatcctccaacggccttcaacaaggacaagctgaactctttcatcacccagtattctactggccaagtcagcgtggagatcgagtgggagctgcagaaggaaaacagcaagcgctggaacccggagatccagtacacttccaactattacaagtctaataatgttgaatttgctgttaatactgaaggtgtatatagtgaaccccgccccattggcacgcggtatttaacgaggaactta

SEQ ID NO: 24 - DNA, 2226 bp, synthetic construct
  source 1..2226: mol_type = other DNA
atggctgccgatggttatcttccagattggctcgaggacaaccttagtgaaggaattcgcgagtggtgggctttgaaacctggagcccctcaacccaaggcaaatcaacaacatcaagacaacgctcgaggtcttgtgcttccgggttacaaataccttggacccggcaacggactcgacaagggggagccggtcaacgcagcagacgcggcggccctcgagcacgacaaggcctacgaccagcagctcaaggccggagacaacccgtacctcaagtacaaccacgccgacgccgagttccaggagcggctcaaagaagatacgtcttttgggggcaacctcgggcgagcagtcttccaggccaaaaagaggcttcttgaacctcttggtctggttgaggaagcggctaagacggctcctggaaagaagaggcctgtagagcagtctcctcaggaaccggactcctccgcgggtattggcaaatcgggtgcacagcccgctaaaaagagactcaatttcggtcagactggcgacacagagtcagtcccagaccctcaaccaatcggagaacctcccgcagccccctcaggtgtgggatctcttacaatggcttcaggtggtggcgcaccagtggcagacaataacgaaggtgccgatggagtgggtagttcctcgggaaattggcattgcgattcccaatggctgggggacagagtcatcaccaccagcacccgaacctgggccctgcccacctacaacaatcacctctacaagcaaatctccaacagcacatctggaggatcttcaaatgacaacgcctacttcggctacagcaccccctgggggtattttgacttcaacagattccactgccacttctcaccacgtgactggcagcgactcatcaacaacaactggggattccggcctaagcgactcaacttcaagctcttcaacattcaggtcaaagaggttacggacaacaatggagtcaagaccatcgccaataaccttaccagcacggtccaggtcttcacggactcagactatcagctcccgtacgtgctcgggtcggctcacgagggctgcctcccgccgttcccagcggacgttttcatgattcctcagtacgggtatctgacgcttaatgatggaagccaggccgtgggtcgttcgtccttttactgcctggaatatttcccgtcgcaaatgctaagaacgggtaacaacttccagttcagctacgagtttgagaacgtacctttccatagcagctacgctcacagccaaagcctggaccgactaatgaatccactcatcgatcagtatctgtattacttgagtaagtatattgtgggttctggttctccgcattctaaggcgcagaatcagcagacgttgaagttttcggtagctggtcctagcaacatggctgtccagggaagaaactacatacctggacccagctaccgacaacaacgtgtctcaaccactgtgactcaaaacaacaacagcgaatttgcttggcctggagcttcttcttgggctctcaatggacgtaatagcttgatgaatcctggacctgctatggccagccacaaagaaggagaggaccgtttctttcctttgtctggatctttaatttttggcaaacaaggaactggaagagacaacgtggatgcggacaaagtcatgataaccaacgaagaagaaattaaaactactaacccggtagcaacggagtcctatggacaagtggccacaaaccaccagagtgcccaagcacaggcgcagaccggctgggttcaaaaccaaggaatacttccgggtatggtttggcaggacagagatgtgtacctgcaaggacccatttgggccaaaattcctcacacggacggcaactttcacccttctccgctgatgggagggtttggaatgaagcacccgcctcctcagatcctcatcaaaaacacacctgtacctgcggatcctccaacggccttcaacaaggacaagctgaactctttcatcacccagtattctactggccaagtcagcgtggagatcgagtgggagctgcagaaggaaaacagcaagcgctggaacccggagatccagtacacttccaactattacaagtctaataatgttgaatttgctgttaatactgaaggtgtatatagtgaaccccgccccattggcacgcggtatttaacgaggaactta

SEQ ID NO: 25 - DNA, 2226 bp, synthetic construct
  source 1..2226: mol_type = other DNA
atggctgccgatggttatcttccagattggctcgaggacaaccttagtgaaggaattcgcgagtggtgggctttgaaacctggagcccctcaacccaaggcaaatcaacaacatcaagacaacgctcgaggtcttgtgcttccgggttacaaataccttggacccggcaacggactcgacaagggggagccggtcaacgcagcagacgcggcggccctcgagcacgacaaggcctacgaccagcagctcaaggccggagacaacccgtacctcaagtacaaccacgccgacgccgagttccaggagcggctcaaagaagatacgtcttttgggggcaacctcgggcgagcagtcttccaggccaaaaagaggcttcttgaacctcttggtctggttgaggaagcggctaagacggctcctggaaagaagaggcctgtagagcagtctcctcaggaaccggactcctccgcgggtattggcaaatcgggtgcacagcccgctaaaaagagactcaatttcggtcagactggcgacacagagtcagtcccagaccctcaaccaatcggagaacctcccgcagccccctcaggtgtgggatctcttacaatggcttcaggtggtggcgcaccagtggcagacaataacgaaggtgccgatggagtgggtagttcctcgggaaattggcattgcgattcccaatggctgggggacagagtcatcaccaccagcacccgaacctgggccctgcccacctacaacaatcacctctacaagcaaatctccaacagcacatctggaggatcttcaaatgacaacgcctacttcggctacagcaccccctgggggtattttgacttcaacagattccactgccacttctcaccacgtgactggcagcgactcatcaacaacaactggggattccggcctaagcgactcaacttcaagctcttcaacattcaggtcaaagaggttacggacaacaatggagtcaagaccatcgccaataaccttaccagcacggtccaggtcttcacggactcagactatcagctcccgtacgtgctcgggtcggctcacgagggctgcctcccgccgttcccagcggacgttttcatgattcctcagtacgggtatctgacgcttaatgatggaagccaggccgtgggtcgttcgtccttttactgcctggaatatttcccgtcgcaaatgctaagaacgggtaacaacttccagttcagctacgagtttgagaacgtacctttccatagcagctacgctcacagccaaagcctggaccgactaatgaatccactcatcgatcagtatctgtattacttgagtaagacgatttctaagcgtggttctccgcattctaaggcgcagaatcagcagacgttgaagttttcggtagctggtcctagcaacatggctgtccagggaagaaactacatacctggacccagctaccgacaacaacgtgtctcaaccactgtgactcaaaacaacaacagcgaatttgcttggcctggagcttcttcttgggctctcaatggacgtaatagcttgatgaatcctggacctgctatggccagccacaaagaaggagaggaccgtttctttcctttgtctggatctttaatttttggcaaacaaggaactggaagagacaacgtggatgcggacaaagtcatgataaccaacgaagaagaaattaaaactactaacccggtagcaacggagtcctatggacaagtggccacaaaccaccagagtgcccaagcacaggcgcagaccggctgggttcaaaaccaaggaatacttccgggtatggtttggcaggacagagatgtgtacctgcaaggacccatttgggccaaaattcctcacacggacggcaactttcacccttctccgctgatgggagggtttggaatgaagcacccgcctcctcagatcctcatcaaaaacacacctgtacctgcggatcctccaacggccttcaacaaggacaagctgaactctttcatcacccagtattctactggccaagtcagcgtggagatcgagtgggagctgcagaaggaaaacagcaagcgctggaacccggagatccagtacacttccaactattacaagtctaataatgttgaatttgctgttaatactgaaggtgtatatagtgaaccccgccccattggcacgcggtatttaacgaggaactta

SEQ ID NO: 26 - DNA, 2226 bp, synthetic construct
  source 1..2226: mol_type = other DNA
atggctgccgatggttatcttccagattggctcgaggacaaccttagtgaaggaattcgcgagtggtgggctttgaaacctggagcccctcaacccaaggcaaatcaacaacatcaagacaacgctcgaggtcttgtgcttccgggttacaaataccttggacccggcaacggactcgacaagggggagccggtcaacgcagcagacgcggcggccctcgagcacgacaaggcctacgaccagcagctcaaggccggagacaacccgtacctcaagtacaaccacgccgacgccgagttccaggagcggctcaaagaagatacgtcttttgggggcaacctcgggcgagcagtcttccaggccaaaaagaggcttcttgaacctcttggtctggttgaggaagcggctaagacggctcctggaaagaagaggcctgtagagcagtctcctcaggaaccggactcctccgcgggtattggcaaatcgggtgcacagcccgctaaaaagagactcaatttcggtcagactggcgacacagagtcagtcccagaccctcaaccaatcggagaacctcccgcagccccctcaggtgtgggatctcttacaatggcttcaggtggtggcgcaccagtggcagacaataacgaaggtgccgatggagtgggtagttcctcgggaaattggcattgcgattcccaatggctgggggacagagtcatcaccaccagcacccgaacctgggccctgcccacctacaacaatcacctctacaagcaaatctccaacagcacatctggaggatcttcaaatgacaacgcctacttcggctacagcaccccctgggggtattttgacttcaacagattccactgccacttctcaccacgtgactggcagcgactcatcaacaacaactggggattccggcctaagcgactcaacttcaagctcttcaacattcaggtcaaagaggttacggacaacaatggagtcaagaccatcgccaataaccttaccagcacggtccaggtcttcacggactcagactatcagctcccgtacgtgctcgggtcggctcacgagggctgcctcccgccgttcccagcggacgttttcatgattcctcagtacgggtatctgacgcttaatgatggaagccaggccgtgggtcgttcgtccttttactgcctggaatatttcccgtcgcaaatgctaagaacgggtaacaacttccagttcagctacgagtttgagaacgtacctttccatagcagctacgctcacagccaaagcctggaccgactaatgaatccactcatcgatcagtatctgtattacttgagtaagggtctgggtggttctggttctccgcattctaaggcgcagaatcagcagacgttgaagttttcggtagctggtcctagcaacatggctgtccagggaagaaactacatacctggacccagctaccgacaacaacgtgtctcaaccactgtgactcaaaacaacaacagcgaatttgcttggcctggagcttcttcttgggctctcaatggacgtaatagcttgatgaatcctggacctgctatggccagccacaaagaaggagaggaccgtttctttcctttgtctggatctttaatttttggcaaacaaggaactggaagagacaacgtggatgcggacaaagtcatgataaccaacgaagaagaaattaaaactactaacccggtagcaacggagtcctatggacaagtggccacaaaccaccagagtgcccaagcacaggcgcagaccggctgggttcaaaaccaaggaatacttccgggtatggtttggcaggacagagatgtgtacctgcaaggacccatttgggccaaaattcctcacacggacggcaactttcacccttctccgctgatgggagggtttggaatgaagcacccgcctcctcagatcctcatcaaaaacacacctgtacctgcggatcctccaacggccttcaacaaggacaagctgaactctttcatcacccagtattctactggccaagtcagcgtggagatcgagtgggagctgcagaaggaaaacagcaagcgctggaacccggagatccagtacacttccaactattacaagtctaataatgttgaatttgctgttaatactgaaggtgtatatagtgaaccccgccccattggcacgcggtatttaacgaggaactta

SEQ ID NO: 27 - DNA, 2226 bp, synthetic construct
  source 1..2226: mol_type = other DNA
atggctgccgatggttatcttccagattggctcgaggacaaccttagtgaaggaattcgcgagtggtgggctttgaaacctggagcccctcaacccaaggcaaatcaacaacatcaagacaacgctcgaggtcttgtgcttccgggttacaaataccttggacccggcaacggactcgacaagggggagccggtcaacgcagcagacgcggcggccctcgagcacgacaaggcctacgaccagcagctcaaggccggagacaacccgtacctcaagtacaaccacgccgacgccgagttccaggagcggctcaaagaagatacgtcttttgggggcaacctcgggcgagcagtcttccaggccaaaaagaggcttcttgaacctcttggtctggttgaggaagcggctaagacggctcctggaaagaagaggcctgtagagcagtctcctcaggaaccggactcctccgcgggtattggcaaatcgggtgcacagcccgctaaaaagagactcaatttcggtcagactggcgacacagagtcagtcccagaccctcaaccaatcggagaacctcccgcagccccctcaggtgtgggatctcttacaatggcttcaggtggtggcgcaccagtggcagacaataacgaaggtgccgatggagtgggtagttcctcgggaaattggcattgcgattcccaatggctgggggacagagtcatcaccaccagcacccgaacctgggccctgcccacctacaacaatcacctctacaagcaaatctccaacagcacatctggaggatcttcaaatgacaacgcctacttcggctacagcaccccctgggggtattttgacttcaacagattccactgccacttctcaccacgtgactggcagcgactcatcaacaacaactggggattccggcctaagcgactcaacttcaagctcttcaacattcaggtcaaagaggttacggacaacaatggagtcaagaccatcgccaataaccttaccagcacggtccaggtcttcacggactcagactatcagctcccgtacgtgctcgggtcggctcacgagggctgcctcccgccgttcccagcggacgttttcatgattcctcagtacgggtatctgacgcttaatgatggaagccaggccgtgggtcgttcgtccttttactgcctggaatatttcccgtcgcaaatgctaagaacgggtaacaacttccagttcagctacgagtttgagaacgtacctttccatagcagctacgctcacagccaaagcctggaccgactaatgaatccactcatcgatcagtatctgtattacttgagtaagacgattaatggtcatgattctccgcattctaaggcgcagaatctgcagacgttgaagttttcggtagctggtcctagcaacatggctgtccagggaagaaactacatacctggacccagctaccgacaacaacgtgtctcaaccactgtgactcaaaacaacaacagcgaatttgcttggcctggagcttcttcttgggctctcaatggacgtaatagcttgatgaatcctggacctgctatggccagccacaaagaaggagaggaccgtttctttcctttgtctggatctttaatttttggcaaacaaggaactggaagagacaacgtggatgcggacaaagtcatgataaccaacgaagaagaaattaaaactactaacccggtagcaacggagtcctatggacaagtggccacaaaccaccagagtgcccaagcacaggcgcagaccggctgggttcaaaaccaaggaatacttccgggtatggtttggcaggacagagatgtgtacctgcaaggacccatttgggccaaaattcctcacacggacggcaactttcacccttctccgctgatgggagggtttggaatgaagcacccgcctcctcagatcctcatcaaaaacacacctgtacctgcggatcctccaacggccttcaacaaggacaagctgaactctttcatcacccagtattctactggccaagtcagcgtggagatcgagtgggagctgcagaaggaaaacagcaagcgctggaacccggagatccagtacacttccaactattacaagtctaataatgttgaatttgctgttaatactgaaggtgtatatagtgaaccccgccccattggcacgcggtatttaacgaggaactta

SEQ ID NO: 28 - DNA, 2226 bp, synthetic construct
  source 1..2226: mol_type = other DNA
atggctgccgatggttatcttccagattggctcgaggacaaccttagtgaaggaattcgcgagtggtgggctttgaaacctggagcccctcaacccaaggcaaatcaacaacatcaagacaacgctcgaggtcttgtgcttccgggttacaaataccttggacccggcaacggactcgacaagggggagccggtcaacgcagcagacgcggcggccctcgagcacgacaaggcctacgaccagcagctcaaggccggagacaacccgtacctcaagtacaaccacgccgacgccgagttccaggagcggctcaaagaagatacgtcttttgggggcaacctcgggcgagcagtcttccaggccaaaaagaggcttcttgaacctcttggtctggttgaggaagcggctaagacggctcctggaaagaagaggcctgtagagcagtctcctcaggaaccggactcctccgcgggtattggcaaatcgggtgcacagcccgctaaaaagagactcaatttcggtcagactggcgacacagagtcagtcccagaccctcaaccaatcggagaacctcccgcagccccctcaggtgtgggatctcttacaatggcttcaggtggtggcgcaccagtggcagacaataacgaaggtgccgatggagtgggtagttcctcgggaaattggcattgcgattcccaatggctgggggacagagtcatcaccaccagcacccgaacctgggccctgcccacctacaacaatcacctctacaagcaaatctccaacagcacatctggaggatcttcaaatgacaacgcctacttcggctacagcaccccctgggggtattttgacttcaacagattccactgccacttctcaccacgtgactggcagcgactcatcaacaacaactggggattccggcctaagcgactcaacttcaagctcttcaacattcaggtcaaagaggttacggacaacaatggagtcaagaccatcgccaataaccttaccagcacggtccaggtcttcacggactcagactatcagctcccgtacgtgctcgggtcggctcacgagggctgcctcccgccgttcccagcggacgttttcatgattcctcagtacgggtatctgacgcttaatgatggaagccaggccgtgggtcgttcgtccttttactgcctggaatatttcccgtcgcaaatgctaagaacgggtaacaacttccagttcagctacgagtttgagaacgtacctttccatagcagctacgctcacagccaaagcctggaccgactaatgaatccactcatcgatcagtatctgtattacttgagtaagacggtgaatggtcatgattctccgcattctaaggcgcagaatcagcagacgttgaagttttcggtagctggtcctagcaacatggctgtccagggaagaaactacatacctggacccagctaccgacaacaacgtgtctcaaccactgtgactcaaaacaacaacagcgaatttgcttggcctggagcttcttcttgggctctcaatggacgtaatagcttgatgaatcctggacctgctatggccagccacaaagaaggagaggaccgtttctttcctttgtctggatctttaatttttggcaaacaaggaactggaagagacaacgtggatgcggacaaagtcatgataaccaacgaagaagaaattaaaactactaacccggtagcaacggagtcctatggacaagtggccacaaaccaccagagtgcccaagcacaggcgcagaccggctgggttcaaaaccaaggaatacttccgggtatggtttggcaggacagagatgtgtacctgcaaggacccatttgggccaaaattcctcacacggacggcaactttcacccttctccgctgatgggagggtttggaatgaagcacccgcctcctcagatcctcatcaaaaacacacctgtacctgcggatcctccaacggccttcaacaaggacaagctgaactctttcatcacccagtattctactggccaagtcagcgtggagatcgagtgggagctgcagaaggaaaacagcaagcgctggaacccggagatccagtacacttccaactattacaagtctaataatgttgaatttgctgttaatactgaaggtgtatatagtgaaccccgccccattggcacgcggtatttaacgaggaactta

SEQ ID NO: 29 - DNA, 2226 bp, synthetic construct
  source 1..2226: mol_type = other DNA
atggctgccgatggttatcttccagattggctcgaggacaaccttagtgaaggaattcgcgagtggtgggctttgaaacctggagcccctcaacccaaggcaaatcaacaacatcaagacaacgctcgaggtcttgtgcttccgggttacaaataccttggacccggcaacggactcgacaagggggagccggtcaacgcagcagacgcggcggccctcgagcacgacaaggcctacgaccagcagctcaaggccggagacaacccgtacctcaagtacaaccacgccgacgccgagttccaggagcggctcaaagaagatacgtcttttgggggcaacctcgggcgagcagtcttccaggccaaaaagaggcttcttgaacctcttggtctggttgaggaagcggctaagacggctcctggaaagaagaggcctgtagagcagtctcctcaggaaccggactcctccgcgggtattggcaaatcgggtgcacagcccgctaaaaagagactcaatttcggtcagactggcgacacagagtcagtcccagaccctcaaccaatcggagaacctcccgcagccccctcaggtgtgggatctcttacaatggcttcaggtggtggcgcaccagtggcagacaataacgaaggtgccgatggagtgggtagttcctcgggaaattggcattgcgattcccaatggctgggggacagagtcatcaccaccagcacccgaacctgggccctgcccacctacaacaatcacctctacaagcaaatctccaacagcacatctggaggatcttcaaatgacaacgcctacttcggctacagcaccccctgggggtattttgacttcaacagattccactgccacttctcaccacgtgactggcagcgactcatcaacaacaactggggattccggcctaagcgactcaacttcaagctcttcaacattcaggtcaaagaggttacggacaacaatggagtcaagaccatcgccaataaccttaccagcacggtccaggtcttcacggactcagactatcagctcccgtacgtgctcgggtcggctcacgagggctgcctcccgccgttcccagcggacgttttcatgattcctcagtacgggtatctgacgcttaatgatggaagccaggccgtgggtcgttcgtccttttactgcctggaatatttcccgtcgcaaatgctaagaacgggtaacaacttccagttcagctacgagtttgagaacgtacctttccatagcagctacgctcacagccaaagcctggaccgactaatgaatccactcatcgatcagtatctgtattacttgagtaagacgattaatggtcatgattctccgcattctaaggcgctgaatcagcagacgttgaagttttcggtagctggtcctagcaacatggctgtccagggaagaaactacatacctggacccagctaccgacaacaacgtgtctcaaccactgtgactcaaaacaacaacagcgaatttgcttggcctggagcttcttcttgggctctcaatggacgtaatagcttgatgaatcctggacctgctatggccagccacaaagaaggagaggaccgtttctttcctttgtctggatctttaatttttggcaaacaaggaactggaagagacaacgtggatgcggacaaagtcatgataaccaacgaagaagaaattaaaactactaacccggtagcaacggagtcctatggacaagtggccacaaaccaccagagtgcccaagcacaggcgcagaccggctgggttcaaaaccaaggaatacttccgggtatggtttggcaggacagagatgtgtacctgcaaggacccatttgggccaaaattcctcacacggacggcaactttcacccttctccgctgatgggagggtttggaatgaagcacccgcctcctcagatcctcatcaaaaacacacctgtacctgcggatcctccaacggccttcaacaaggacaagctgaactctttcatcacccagtattctactggccaagtcagcgtggagatcgagtgggagctgcagaaggaaaacagcaagcgctggaacccggagatccagtacacttccaactattacaagtctaataatgttgaatttgctgttaatactgaaggtgtatatagtgaaccccgccccattggcacgcggtatttaacgaggaactta

SEQ ID NO: 30 - DNA, 2226 bp, synthetic construct
  source 1..2226: mol_type = other DNA
atggctgccgatggttatcttccagattggctcgaggacaaccttagtgaaggaattcgcgagtggtgggctttgaaacctggagcccctcaacccaaggcaaatcaacaacatcaagacaacgctcgaggtcttgtgcttccgggttacaaataccttggacccggcaacggactcgacaagggggagccggtcaacgcagcagacgcggcggccctcgagcacgacaaggcctacgaccagcagctcaaggccggagacaacccgtacctcaagtacaaccacgccgacgccgagttccaggagcggctcaaagaagatacgtcttttgggggcaacctcgggcgagcagtcttccaggccaaaaagaggcttcttgaacctcttggtctggttgaggaagcggctaagacggctcctggaaagaagaggcctgtagagcagtctcctcaggaaccggactcctccgcgggtattggcaaatcgggtgcacagcccgctaaaaagagactcaatttcggtcagactggcgacacagagtcagtcccagaccctcaaccaatcggagaacctcccgcagccccctcaggtgtgggatctcttacaatggcttcaggtggtggcgcaccagtggcagacaataacgaaggtgccgatggagtgggtagttcctcgggaaattggcattgcgattcccaatggctgggggacagagtcatcaccaccagcacccgaacctgggccctgcccacctacaacaatcacctctacaagcaaatctccaacagcacatctggaggatcttcaaatgacaacgcctacttcggctacagcaccccctgggggtattttgacttcaacagattccactgccacttctcaccacgtgactggcagcgactcatcaacaacaactggggattccggcctaagcgactcaacttcaagctcttcaacattcaggtcaaagaggttacggacaacaatggagtcaagaccatcgccaataaccttaccagcacggtccaggtcttcacggactcagactatcagctcccgtacgtgctcgggtcggctcacgagggctgcctcccgccgttcccagcggacgttttcatgattcctcagtacgggtatctgacgcttaatgatggaagccaggccgtgggtcgttcgtccttttactgcctggaatatttcccgtcgcaaatgctaagaacgggtaacaacttccagttcagctacgagtttgagaacgtacctttccatagcagctacgctcacagccaaagcctggaccgactaatgaatccactcatcgatcagtatctgtattacttgagtaagacgattaatggtcatgattctccgcattctaaggcgcagaatcagcagtctttgaagttttcggtagctggtcctagcaacatggctgtccagggaagaaactacatacctggacccagctaccgacaacaacgtgtctcaaccactgtgactcaaaacaacaacagcgaatttgcttggcctggagcttcttcttgggctctcaatggacgtaatagcttgatgaatcctggacctgctatggccagccacaaagaaggagaggaccgtttctttcctttgtctggatctttaatttttggcaaacaaggaactggaagagacaacgtggatgcggacaaagtcatgataaccaacgaagaagaaattaaaactactaacccggtagcaacggagtcctatggacaagtggccacaaaccaccagagtgcccaagcacaggcgcagaccggctgggttcaaaaccaaggaatacttccgggtatggtttggcaggacagagatgtgtacctgcaaggacccatttgggccaaaattcctcacacggacggcaactttcacccttctccgctgatgggagggtttggaatgaagcacccgcctcctcagatcctcatcaaaaacacacctgtacctgcggatcctccaacggccttcaacaaggacaagctgaactctttcatcacccagtattctactggccaagtcagcgtggagatcgagtgggagctgcagaaggaaaacagcaagcgctggaacccggagatccagtacacttccaactattacaagtctaataatgttgaatttgctgttaatactgaaggtgtatatagtgaaccccgccccattggcacgcggtatttaacgaggaactta

SEQ ID NO: 31 - DNA, 2226 bp, synthetic construct
  source 1..2226: mol_type = other DNA
atggctgccgatggttatcttccagattggctcgaggacaaccttagtgaaggaattcgcgagtggtgggctttgaaacctggagcccctcaacccaaggcaaatcaacaacatcaagacaacgctcgaggtcttgtgcttccgggttacaaataccttggacccggcaacggactcgacaagggggagccggtcaacgcagcagacgcggcggccctcgagcacgacaaggcctacgaccagcagctcaaggccggagacaacccgtacctcaagtacaaccacgccgacgccgagttccaggagcggctcaaagaagatacgtcttttgggggcaacctcgggcgagcagtcttccaggccaaaaagaggcttcttgaacctcttggtctggttgaggaagcggctaagacggctcctggaaagaagaggcctgtagagcagtctcctcaggaaccggactcctccgcgggtattggcaaatcgggtgcacagcccgctaaaaagagactcaatttcggtcagactggcgacacagagtcagtcccagaccctcaaccaatcggagaacctcccgcagccccctcaggtgtgggatctcttacaatggcttcaggtggtggcgcaccagtggcagacaataacgaaggtgccgatggagtgggtagttcctcgggaaattggcattgcgattcccaatggctgggggacagagtcatcaccaccagcacccgaacctgggccctgcccacctacaacaatcacctctacaagcaaatctccaacagcacatctggaggatcttcaaatgacaacgcctacttcggctacagcaccccctgggggtattttgacttcaacagattccactgccacttctcaccacgtgactggcagcgactcatcaacaacaactggggattccggcctaagcgactcaacttcaagctcttcaacattcaggtcaaagaggttacggacaacaatggagtcaagaccatcgccaataaccttaccagcacggtccaggtcttcacggactcagactatcagctcccgtacgtgctcgggtcggctcacgagggctgcctcccgccgttcccagcggacgttttcatgattcctcagtacgggtatctgacgcttaatgatggaagccaggccgtgggtcgttcgtccttttactgcctggaatatttcccgtcgcaaatgctaagaacgggtaacaacttccagttcagctacgagtttgagaacgtacctttccatagcagctacgctcacagccaaagcctggaccgactaatgaatccactcatcgatcagtatctgtattacttgagtaagacgattaatggtcatgattctccgcattctaaggcgcagaatcagcagattttgaagttttcggtagctggtcctagcaacatggctgtccagggaagaaactacatacctggacccagctaccgacaacaacgtgtctcaaccactgtgactcaaaacaacaacagcgaatttgcttggcctggagcttcttcttgggctctcaatggacgtaatagcttgatgaatcctggacctgctatggccagccacaaagaaggagaggaccgtttctttcctttgtctggatctttaatttttggcaaacaaggaactggaagagacaacgtggatgcggacaaagtcatgataaccaacgaagaagaaattaaaactactaacccggtagcaacggagtcctatggacaagtggccacaaaccaccagagtgcccaagcacaggcgcagaccggctgggttcaaaaccaaggaatacttccgggtatggtttggcaggacagagatgtgtacctgcaaggacccatttgggccaaaattcctcacacggacggcaactttcacccttctccgctgatgggagggtttggaatgaagcacccgcctcctcagatcctcatcaaaaacacacctgtacctgcggatcctccaacggccttcaacaaggacaagctgaactctttcatcacccagtattctactggccaagtcagcgtggagatcgagtgggagctgcagaaggaaaacagcaagcgctggaacccggagatccagtacacttccaactattacaagtctaataatgttgaatttgctgttaatactgaaggtgtatatagtgaaccccgccccattggcacgcggtatttaacgaggaactta

SEQ ID NO: 32 - DNA, 2226 bp, synthetic construct
  source 1..2226: mol_type = other DNA
atggctgccgatggttatcttccagattggctcgaggacaaccttagtgaaggaattcgcgagtggtgggctttgaaacctggagcccctcaacccaaggcaaatcaacaacatcaagacaacgctcgaggtcttgtgcttccgggttacaaataccttggacccggcaacggactcgacaagggggagccggtcaacgcagcagacgcggcggccctcgagcacgacaaggcctacgaccagcagctcaaggccggagacaacccgtacctcaagtacaaccacgccgacgccgagttccaggagcggctcaaagaagatacgtcttttgggggcaacctcgggcgagcagtcttccaggccaaaaagaggcttcttgaacctcttggtctggttgaggaagcggctaagacggctcctggaaagaagaggcctgtagagcagtctcctcaggaaccggactcctccgcgggtattggcaaatcgggtgcacagcccgctaaaaagagactcaatttcggtcagactggcgacacagagtcagtcccagaccctcaaccaatcggagaacctcccgcagccccctcaggtgtgggatctcttacaatggcttcaggtggtggcgcaccagtggcagacaataacgaaggtgccgatggagtgggtagttcctcgggaaattggcattgcgattcccaatggctgggggacagagtcatcaccaccagcacccgaacctgggccctgcccacctacaacaatcacctctacaagcaaatctccaacagcacatctggaggatcttcaaatgacaacgcctacttcggctacagcaccccctgggggtattttgacttcaacagattccactgccacttctcaccacgtgactggcagcgactcatcaacaacaactggggattccggcctaagcgactcaacttcaagctcttcaacattcaggtcaaagaggttacggacaacaatggagtcaagaccatcgccaataaccttaccagcacggtccaggtcttcacggactcagactatcagctcccgtacgtgctcgggtcggctcacgagggctgcctcccgccgttcccagcggacgttttcatgattcctcagtacgggtatctgacgcttaatgatggaagccaggccgtgggtcgttcgtccttttactgcctggaatatttcccgtcgcaaatgctaagaacgggtaacaacttccagttcagctacgagtttgagaacgtacctttccatagcagctacgctcacagccaaagcctggaccgactaatgaatccactcatcgatcagtatctgtattacttgagtaagacgattaatggttctggttctccgcattttacgcgtcagaatcagcagacgttgaagttttcggtagctggtcctagcaacatggctgtccagggaagaaactacatacctggacccagctaccgacaacaacgtgtctcaaccactgtgactcaaaacaacaacagcgaatttgcttggcctggagcttcttcttgggctctcaatggacgtaatagcttgatgaatcctggacctgctatggccagccacaaagaaggagaggaccgtttctttcctttgtctggatctttaatttttggcaaacaaggaactggaagagacaacgtggatgcggacaaagtcatgataaccaacgaagaagaaattaaaactactaacccggtagcaacggagtcctatggacaagtggccacaaaccaccagagtgcccaagcacaggcgcagaccggctgggttcaaaaccaaggaatacttccgggtatggtttggcaggacagagatgtgtacctgcaaggacccatttgggccaaaattcctcacacggacggcaactttcacccttctccgctgatgggagggtttggaatgaagcacccgcctcctcagatcctcatcaaaaacacacctgtacctgcggatcctccaacggccttcaacaaggacaagctgaactctttcatcacccagtattctactggccaagtcagcgtggagatcgagtgggagctgcagaaggaaaacagcaagcgctggaacccggagatccagtacacttccaactattacaagtctaataatgttgaatttgctgttaatactgaaggtgtatatagtgaaccccgccccattggcacgcggtatttaacgaggaactta

SEQ ID NO: 33 - DNA, 2226 bp, synthetic construct
  source 1..2226: mol_type = other DNA
atggctgccgatggttatcttccagattggctcgaggacaaccttagtgaaggaattcgcgagtggtgggctttgaaacctggagcccctcaacccaaggcaaatcaacaacatcaagacaacgctcgaggtcttgtgcttccgggttacaaataccttggacccggcaacggactcgacaagggggagccggtcaacgcagcagacgcggcggccctcgagcacgacaaggcctacgaccagcagctcaaggccggagacaacccgtacctcaagtacaaccacgccgacgccgagttccaggagcggctcaaagaagatacgtcttttgggggcaacctcgggcgagcagtcttccaggccaaaaagaggcttcttgaacctcttggtctggttgaggaagcggctaagacggctcctggaaagaagaggcctgtagagcagtctcctcaggaaccggactcctccgcgggtattggcaaatcgggtgcacagcccgctaaaaagagactcaatttcggtcagactggcgacacagagtcagtcccagaccctcaaccaatcggagaacctcccgcagccccctcaggtgtgggatctcttacaatggcttcaggtggtggcgcaccagtggcagacaataacgaaggtgccgatggagtgggtagttcctcgggaaattggcattgcgattcccaatggctgggggacagagtcatcaccaccagcacccgaacctgggccctgcccacctacaacaatcacctctacaagcaaatctccaacagcacatctggaggatcttcaaatgacaacgcctacttcggctacagcaccccctgggggtattttgacttcaacagattccactgccacttctcaccacgtgactggcagcgactcatcaacaacaactggggattccggcctaagcgactcaacttcaagctcttcaacattcaggtcaaagaggttacggacaacaatggagtcaagaccatcgccaataaccttaccagcacggtccaggtcttcacggactcagactatcagctcccgtacgtgctcgggtcggctcacgagggctgcctcccgccgttcccagcggacgttttcatgattcctcagtacgggtatctgacgcttaatgatggaagccaggccgtgggtcgttcgtccttttactgcctggaatatttcccgtcgcaaatgctaagaacgggtaacaacttccagttcagctacgagtttgagaacgtacctttccatagcagctacgctcacagccaaagcctggaccgactaatgaatccactcatcgatcagtatctgtattacttgagtaagacgtctaatggtcatgattctccgcattctaaggcgcagaatcagcagacgttgaagttttcggtagctggtcctagcaacatggctgtccagggaagaaactacatacctggacccagctaccgacaacaacgtgtctcaaccactgtgactcaaaacaacaacagcgaatttgcttggcctggagcttcttcttgggctctcaatggacgtaatagcttgatgaatcctggacctgctatggccagccacaaagaaggagaggaccgtttctttcctttgtctggatctttaatttttggcaaacaaggaactggaagagacaacgtggatgcggacaaagtcatgataaccaacgaagaagaaattaaaactactaacccggtagcaacggagtcctatggacaagtggccacaaaccaccagagtgcccaagcacaggcgcagaccggctgggttcaaaaccaaggaatacttccgggtatggtttggcaggacagagatgtgtacctgcaaggacccatttgggccaaaattcctcacacggacggcaactttcacccttctccgctgatgggagggtttggaatgaagcacccgcctcctcagatcctcatcaaaaacacacctgtacctgcggatcctccaacggccttcaacaaggacaagctgaactctttcatcacccagtattctactggccaagtcagcgtggagatcgagtgggagctgcagaaggaaaacagcaagcgctggaacccggagatccagtacacttccaactattacaagtctaataatgttgaatttgctgttaatactgaaggtgtatatagtgaaccccgccccattggcacgcggtatttaacgaggaactta

SEQ ID NO: 34 - DNA, 2226 bp, synthetic construct
  source 1..2226: mol_type = other DNA
atggctgccgatggttatcttccagattggctcgaggacaaccttagtgaaggaattcgcgagtggtgggctttgaaacctggagcccctcaacccaaggcaaatcaacaacatcaagacaacgctcgaggtcttgtgcttccgggttacaaataccttggacccggcaacggactcgacaagggggagccggtcaacgcagcagacgcggcggccctcgagcacgacaaggcctacgaccagcagctcaaggccggagacaacccgtacctcaagtacaaccacgccgacgccgagttccaggagcggctcaaagaagatacgtcttttgggggcaacctcgggcgagcagtcttccaggccaaaaagaggcttcttgaacctcttggtctggttgaggaagcggctaagacggctcctggaaagaagaggcctgtagagcagtctcctcaggaaccggactcctccgcgggtattggcaaatcgggtgcacagcccgctaaaaagagactcaatttcggtcagactggcgacacagagtcagtcccagaccctcaaccaatcggagaacctcccgcagccccctcaggtgtgggatctcttacaatggcttcaggtggtggcgcaccagtggcagacaataacgaaggtgccgatggagtgggtagttcctcgggaaattggcattgcgattcccaatggctgggggacagagtcatcaccaccagcacccgaacctgggccctgcccacctacaacaatcacctctacaagcaaatctccaacagcacatctggaggatcttcaaatgacaacgcctacttcggctacagcaccccctgggggtattttgacttcaacagattccactgccacttctcaccacgtgactggcagcgactcatcaacaacaactggggattccggcctaagcgactcaacttcaagctcttcaacattcaggtcaaagaggttacggacaacaatggagtcaagaccatcgccaataaccttaccagcacggtccaggtcttcacggactcagactatcagctcccgtacgtgctcgggtcggctcacgagggctgcctcccgccgttcccagcggacgttttcatgattcctcagtacgggtatctgacgcttaatgatggaagccaggccgtgggtcgttcgtccttttactgcctggaatatttcccgtcgcaaatgctaagaacgggtaacaacttccagttcagctacgagtttgagaacgtacctttccatagcagctacgctcacagccaaagcctggaccgactaatgaatccactcatcgatcagtatctgtattacttgagtaagacgattaatggttctggttctccgcattctctgccgtggaatcagcagacgttgaagttttcggtagctggtcctagcaacatggctgtccagggaagaaactacatacctggacccagctaccgacaacaacgtgtctcaaccactgtgactcaaaacaacaacagcgaatttgcttggcctggagcttcttcttgggctctcaatggacgtaatagcttgatgaatcctggacctgctatggccagccacaaagaaggagaggaccgtttctttcctttgtctggatctttaatttttggcaaacaaggaactggaagagacaacgtggatgcggacaaagtcatgataaccaacgaagaagaaattaaaactactaacccggtagcaacggagtcctatggacaagtggccacaaaccaccagagtgcccaagcacaggcgcagaccggctgggttcaaaaccaaggaatacttccgggtatggtttggcaggacagagatgtgtacctgcaaggacccatttgggccaaaattcctcacacggacggcaactttcacccttctccgctgatgggagggtttggaatgaagcacccgcctcctcagatcctcatcaaaaacacacctgtacctgcggatcctccaacggccttcaacaaggacaagctgaactctttcatcacccagtattctactggccaagtcagcgtggagatcgagtgggagctgcagaaggaaaacagcaagcgctggaacccggagatccagtacacttccaactattacaagtctaataatgttgaatttgctgttaatactgaaggtgtatatagtgaaccccgccccattggcacgcggtatttaacgaggaactta

SEQ ID NO: 35 - DNA, 2226 bp, synthetic construct
  source 1..2226: mol_type = other DNA
atggctgccgatggttatcttccagattggctcgaggacaaccttagtgaaggaattcgcgagtggtgggctttgaaacctggagcccctcaacccaaggcaaatcaacaacatcaagacaacgctcgaggtcttgtgcttccgggttacaaataccttggacccggcaacggactcgacaagggggagccggtcaacgcagcagacgcggcggccctcgagcacgacaaggcctacgaccagcagctcaaggccggagacaacccgtacctcaagtacaaccacgccgacgccgagttccaggagcggctcaaagaagatacgtcttttgggggcaacctcgggcgagcagtcttccaggccaaaaagaggcttcttgaacctcttggtctggttgaggaagcggctaagacggctcctggaaagaagaggcctgtagagcagtctcctcaggaaccggactcctccgcgggtattggcaaatcgggtgcacagcccgctaaaaagagactcaatttcggtcagactggcgacacagagtcagtcccagaccctcaaccaatcggagaacctcccgcagccccctcaggtgtgggatctcttacaatggcttcaggtggtggcgcaccagtggcagacaataacgaaggtgccgatggagtgggtagttcctcgggaaattggcattgcgattcccaatggctgggggacagagtcatcaccaccagcacccgaacctgggccctgcccacctacaacaatcacctctacaagcaaatctccaacagcacatctggaggatcttcaaatgacaacgcctacttcggctacagcaccccctgggggtattttgacttcaacagattccactgccacttctcaccacgtgactggcagcgactcatcaacaacaactggggattccggcctaagcgactcaacttcaagctcttcaacattcaggtcaaagaggttacggacaacaatggagtcaagaccatcgccaataaccttaccagcacggtccaggtcttcacggactcagactatcagctcccgtacgtgctcgggtcggctcacgagggctgcctcccgccgttcccagcggacgttttcatgattcctcagtacgggtatctgacgcttaatgatggaagccaggccgtgggtcgttcgtccttttactgcctggaatatttcccgtcgcaaatgctaagaacgggtaacaacttccagttcagctacgagtttgagaacgtacctttccatagcagctacgctcacagccaaagcctggaccgactaatgaatccactcatcgatcagtatctgtattacttgagtaagacgattaatggtcatgattctccgcattctaaggcgcagaatcatcagacgttgaagttttcggtagctggtcctagcaacatggctgtccagggaagaaactacatacctggacccagctaccgacaacaacgtgtctcaaccactgtgactcaaaacaacaacagcgaatttgcttggcctggagcttcttcttgggctctcaatggacgtaatagcttgatgaatcctggacctgctatggccagccacaaagaaggagaggaccgtttctttcctttgtctggatctttaatttttggcaaacaaggaactggaagagacaacgtggatgcggacaaagtcatgataaccaacgaagaagaaattaaaactactaacccggtagcaacggagtcctatggacaagtggccacaaaccaccagagtgcccaagcacaggcgcagaccggctgggttcaaaaccaaggaatacttccgggtatggtttggcaggacagagatgtgtacctgcaaggacccatttgggccaaaattcctcacacggacggcaactttcacccttctccgctgatgggagggtttggaatgaagcacccgcctcctcagatcctcatcaaaaacacacctgtacctgcggatcctccaacggccttcaacaaggacaagctgaactctttcatcacccagtattctactggccaagtcagcgtggagatcgagtgggagctgcagaaggaaaacagcaagcgctggaacccggagatccagtacacttccaactattacaagtctaataatgttgaatttgctgttaatactgaaggtgtatatagtgaaccccgccccattggcacgcggtatttaacgaggaactta

SEQ ID NO: 36 - protein, 742 aa, synthetic construct
MAADGYLPDWLEDNLSEGIREWWALKPGAPQPKANQQHQDNARGLVLPGYKYLGPGNGLDKGEPVNAADAAALEHDKAYDQQLKAGDNPYLKYNHADAEFQERLKEDTSFGGNLGRAVFQAKKRLLEPLGLVEEAAKTAPGKKRPVEQSPQEPDSSAGIGKSGAQPAKKRLNFGQTGDTESVPDPQPIGEPPAAPSGVGSLTMASGGGAPVADNNEGADGVGSSSGNWHCDSQWLGDRVITTSTRTWALPTYNNHLYKQISNSTSGGSSNDNAYFGYSTPWGYFDFNRFHCHFSPRDWQRLINNNWGFRPKRLNFKLFNIQVKEVTDNNGVKTIANNLTSTVQVFTDSDYQLPYVLGSAHEGCLPPFPADVFMIPQYGYLTLNDGSQAVGRSSFYCLEYFPSQMLRTGNNFQFSYEFENVPFHSSYAHSQSLDRLMNPLIDQYLYYLSKTERVSGSPHSKAQNQQTLKFSVAGPSNMAVQGRNYIPGPSYRQQRVSTTVTQNNNSEFAWPGASSWALNGRNSLMNPGPAMASHKEGEDRFFPLSGSLIFGKQGTGRDNVDADKVMITNEEEIKTTNPVATESYGQVATNHQSAQAQAQTGWVQNQGILPGMVWQDRDVYLQGPIWAKIPHTDGNFHPSPLMGGFGMKHPPPQILIKNTPVPADPPTAFNKDKLNSFITQYSTGQVSVEIEWELQKENSKRWNPEIQYTSNYYKSNNVEFAVNTEGVYSEPRPIGTRYLTRNL

SEQ ID NO: 37 - protein, 742 aa, synthetic construct
MAADGYLPDWLEDNLSEGIREWWALKPGAPQPKANQQHQDNARGLVLPGYKYLGPGNGLDKGEPVNAADAAALEHDKAYDQQLKAGDNPYLKYNHADAEFQERLKEDTSFGGNLGRAVFQAKKRLLEPLGLVEEAAKTAPGKKRPVEQSPQEPDSSAGIGKSGAQPAKKRLNFGQTGDTESVPDPQPIGEPPAAPSGVGSLTMASGGGAPVADNNEGADGVGSSSGNWHCDSQWLGDRVITTSTRTWALPTYNNHLYKQISNSTSGGSSNDNAYFGYSTPWGYFDFNRFHCHFSPRDWQRLINNNWGFRPKRLNFKLFNIQVKEVTDNNGVKTIANNLTSTVQVFTDSDYQLPYVLGSAHEGCLPPFPADVFMIPQYGYLTLNDGSQAVGRSSFYCLEYFPSQMLRTGNNFQFSYEFENVPFHSSYAHSQSLDRLMNPLIDQYLYYLSKAEIGHDSPHKSGQNQQTLKFSVAGPSNMAVQGRNYIPGPSYRQQRVSTTVTQNNNSEFAWPGASSWALNGRNSLMNPGPAMASHKEGEDRFFPLSGSLIFGKQGTGRDNVDADKVMITNEEEIKTTNPVATESYGQVATNHQSAQAQAQTGWVQNQGILPGMVWQDRDVYLQGPIWAKIPHTDGNFHPSPLMGGFGMKHPPPQILIKNTPVPADPPTAFNKDKLNSLITQYSTGQVSVEIEWELQKENSKRWNPEIQYTSNYYKSNNVEFAVNTEGVYSEPRPIGTRYLTRNL

SEQ ID NO: 38 - protein, 742 aa, synthetic construct
MAADGYLPDWLEDNLSEGIREWWALKPGAPQPKANQQHQDNARGLVLPGYKYLGPGNGLDKGEPVNAADAAALEHDKAYDQQLKAGDNPYLKYNHADAEFQERLKEDTSFGGNLGRAVFQAKKRLLEPLGLVEEAAKTAPGKKRPVEQSPQEPDSSAGIGKSGAQPAKKRLNFGQTGDTESVPDPQPIGEPPAAPSGVGSLTMASGGGAPVADNNEGADGVGSSSGNWHCDSQWLGDRVITTSTRTWALPTYNNHLYKQISNSTSGGSSNDNAYFGYSTPWGYFDFNRFHCHFSPRDWQRLINNNWGFRPKRLNFKLFNIQVKEVTDNNGVKTIANNLTSTVQVFTDSDYQLPYVLGSAHEGCLPPFPADVFMIPQYGYLTLNDGSQAVGRSSFYCLEYFPSQMLRTGNNFQFSYEFENVPFHSSYAHSQSLDRLMNPLIDQYLYYLSKTIIGSGSPHSKAQNRHTLKFSVAGPSNMAVQGRNYIPGPSYRQQRVSTTVTQNNNSEFAWPGASSWALNGRNSLMNPGPAMASHKEGEDRFFPLSGSLIFGKQGTGRDNVDADKVMITNEEEIKTTNPVATESYGQVATNHQSAQAQAQTGWVQNQGILPGMVWQDRDVYLQGPIWAKIPHTDGNFHPSPLMGGFGMKHPPPQILIKNTPVPADPPTAFNKDKLNSFITQYSTGQVSVEIEWELQKENSKRWNPEIQYTSNYYKSNNVEFAVNTEGVYSEPRPIGTRYLTRNL

SEQ ID NO: 39 - protein, 742 aa, synthetic construct
MAADGYLPDWLEDNLSEGIREWWALKPGAPQPKANQQHQDNARGLVLPGYKYLGPGNGLDKGEPVNAADAAALEHDKAYDQQLKAGDNPYLKYNHADAEFQERLKEDTSFGGNLGRAVFQAKKRLLEPLGLVEEAAKTAPGKKRPVEQSPQEPDSSAGIGKSGAQPAKKRLNFGQTGDTESVPDPQPIGEPPAAPSGVGSLTMASGGGAPVADNNEGADGVGSSSGNWHCDSQWLGDRVITTSTRTWALPTYNNHLYKQISNSTSGGSSNDNAYFGYSTPWGYFDFNRFHCHFSPRDWQRLINNNWGFRPKRLNFKLFNIQVKEVTDNNGVKTIANNLTSTVQVFTDSDYQLPYVLGSAHEGCLPPFPADVFMIPQYGYLTLNDGSQAVGRSSFYCLEYFPSQMLRTGNNFQFSYEFENVPFHSSYAHSQSLDRLMNPLIDQYLYYLSKTEKMSGSPHSKAQNQQTLKFSVAGPSNMAVQGRNYIPGPSYRQQRVSTTVTQNNNSEFAWPGASSWALNGRNSLMNPGPAMASHKEGEDRFFPLSGSLIFGKQGTGRDNVDADKVMITNEEEIKTTNPVATESYGQVATNHQSAQAQAQTGWVQNQGILPGMVWQDRDVYLQGPIWAKIPHTDGNFHPSPLMGGFGMKHPPPQILIKNTPVPADPPTAFNKDKLNSFITQYSTGQVSVEIEWELQKENSKRWNPEIQYTSNYYKSNNVEFAVNTEGVYSEPRPIGTRYLTRNL

SEQ ID NO: 40 - protein, 742 aa, synthetic construct
MAADGYLPDWLEDNLSEGIREWWALKPGAPQPKANQQHQDNARGLVLPGYKYLGPGNGLDKGEPVNAADAAALEHDKAYDQQLKAGDNPYLKYNHADAEFQERLKEDTSFGGNLGRAVFQAKKRLLEPLGLVEEAAKTAPGKKRPVEQSPQEPDSSAGIGKSGAQPAKKRLNFGQTGDTESVPDPQPIGEPPAAPSGVGSLTMASGGGAPVADNNEGADGVGSSSGNWHCDSQWLGDRVITTSTRTWALPTYNNHLYKQISNSTSGGSSNDNAYFGYSTPWGYFDFNRFHCHFSPRDWQRLINNNWGFRPKRLNFKLFNIQVKEVTDNNGVKTIANNLTSTVQVFTDSDYQLPYVLGSAHEGCLPPFPADVFMIPQYGYLTLNDGSQAVGRSSFYCLEYFPSQMLRTGNNFQFSYEFENVPFHSSYAHSQSLDRLMNPLIDQYLYYLSKEINGRGSPHSKAQNQQTLKFSVAGPSNMAVQGRNYIPGPSYRQQRVSTTVTQNNNSEFAWPGASSWALNGRNSLMNPGPAMASHKEGEDRFFPLSGSLIFGKQGTGRDNVDADKVMITNEEEIKTTNPVATESYGQVATNHQSAQAQAQTGWVQNQGILPGMVWQDRDVYLQGPIWAKIPHTDGNFHPSPLMGGFGMKHPPPQILIKNTPVPADPPTAFNKDKLNSFITQYSTGQVSVEIEWELQKENSKRWNPEIQYTSNYYKSNNVEFAVNTEGVYSEPRPIGTRYLTRNL

SEQ ID NO: 41 - protein, 742 aa, synthetic construct
MAADGYLPDWLEDNLSEGIREWWALKPGAPQPKANQQHQDNARGLVLPGYKYLGPGNGLDKGEPVNAADAAALEHDKAYDQQLKAGDNPYLKYNHADAEFQERLKEDTSFGGNLGRAVFQAKKRLLEPLGLVEEAAKTAPGKKRPVEQSPQEPDSSAGIGKSGAQPAKKRLNFGQTGDTESVPDPQPIGEPPAAPSGVGSLTMASGGGAPVADNNEGADGVGSSSGNWHCDSQWLGDRVITTSTRTWALPTYNNHLYKQISNSTSGGSSNDNAYFGYSTPWGYFDFNRFHCHFSPRDWQRLINNNWGFRPKRLNFKLFNIQVKEVTDNNGVKTIANNLTSTVQVFTDSDYQLPYVLGSAHEGCLPPFPADVFMIPQYGYLTLNDGSQAVGRSSFYCLEYFPSQMLRTGNNFQFSYEFENVPFHSSYAHSQSLDRLMNPLIDQYLYYLSKTFNGSGSPHSKAPNLQTLKFSVAGPSNMAVQGRNYIPGPSYRQQRVSTTVTQNNNSEFAWPGASSWALNGRNSLMNPGPAMASHKEGEDRFFPLSGSLIFGKQGTGRDNVDADKVMITNEEEIKTTNPVATESYGQVATNHQSAQAQAQTGWVQNQGILPGMVWQDRDVYLQGPIWAKIPHTDGNFHPSPLMGGFGMKHPPPQILIKNTPVPADPPTAFNKDKLNSFITQYSTGQVSVEIEWELQKENSKRWNPEIQYTSNYYKSNNVEFAVNTEGVYSEPRPIGTRYLTRNL

SEQ ID NO: 42 - protein, 742 aa, synthetic construct
MAADGYLPDWLEDNLSEGIREWWALKPGAPQPKANQQHQDNARGLVLPGYKYLGPGNGLDKGEPVNAADAAALEHDKAYDQQLKAGDNPYLKYNHADAEFQERLKEDTSFGGNLGRAVFQAKKRLLEPLGLVEEAAKTAPGKKRPVEQSPQEPDSSAGIGKSGAQPAKKRLNFGQTGDTESVPDPQPIGEPPAAPSGVGSLTMASGGGAPVADNNEGADGVGSSSGNWHCDSQWLGDRVITTSTRTWALPTYNNHLYKQISNSTSGGSSNDNAYFGYSTPWGYFDFNRFHCHFSPRDWQRLINNNWGFRPKRLNFKLFNIQVKEVTDNNGVKTIANNLTSTVQVFTDSDYQLPYVLGSAHEGCLPPFPADVFMIPQYGYLTLNDGSQAVGRSSFYCLEYFPSQMLRTGNNFQFSYEFENVPFHSSYAHSQSLDRLMNPLIDQYLYYLSKTEKTSGSPHSKAQNQQTLKFSVAGPSNMAVQGRNYIPGPSYRQQRVSTTVTQNNNSEFAWPGASSWALNGRNSLMNPGPAMASHKEGEDRFFPLSGSLIFGKQGTGRDNVDADKVMITNEEEIKTTNPVATESYGQVATNHQSAQAQAQTGWVQNQGILPGMVWQDRDVYLQGPIWAKIPHTDGNFHPSPLMGGFGMKHPPPQILIKNTPVPADPPTAFNKDKLNSFITQYSTGQVSVEIEWELQKENSKRWNPEIQYTSNYYKSNNVEFAVNTEGVYSEPRPIGTRYLTRNL

SEQ ID NO: 43 - protein, 742 aa, synthetic construct
MAADGYLPDWLEDNLSEGIREWWALKPGAPQPKANQQHQDNARGLVLPGYKYLGPGNGLDKGEPVNAADAAALEHDKAYDQQLKAGDNPYLKYNHADAEFQERLKEDTSFGGNLGRAVFQAKKRLLEPLGLVEEAAKTAPGKKRPVEQSPQEPDSSAGIGKSGAQPAKKRLNFGQTGDTESVPDPQPIGEPPAAPSGVGSLTMASGGGAPVADNNEGADGVGSSSGNWHCDSQWLGDRVITTSTRTWALPTYNNHLYKQISNSTSGGSSNDNAYFGYSTPWGYFDFNRFHCHFSPRDWQRLINNNWGFRPKRLNFKLFNIQVKEVTDNNGVKTIANNLTSTVQVFTDSDYQLPYVLGSAHEGCLPPFPADVFMIPQYGYLTLNDGSQAVGRSSFYCLEYFPSQMLRTGNNFQFSYEFENVPFHSSYAHSQSLDRLMNPLIDQYLYYLSKTMNGHDSPHSKAQNQQTLKFSVAGPSNMAVQGRNYIPGPSYRQQRVSTTVTQNNNSEFAWPGASSWALNGRNSLMNPGPAMASHKEGEDRFFPLSGSLIFGKQGTGRDNVDADKVMITNEEEIKTTNPVATESYGQVATNHQSAQAQAQTGWVQNQGILPGMVWQDRDVYLQGPIWAKIPHTDGNFHPSPLMGGFGMKHPPPQILIKNTPVPADPPTAFNKDKLNSFITQYSTGQVSVEIEWELQKENSKRWNPEIQYTSNYYKSNNVEFAVNTEGVYSEPRPIGTRYLTRNL

SEQ ID NO: 44 - protein, 742 aa, synthetic construct
MAADGYLPDWLEDNLSEGIREWWALKPGAPQPKANQQHQDNARGLVLPGYKYLGPGNGLDKGEPVNAADAAALEHDKAYDQQLKAGDNPYLKYNHADAEFQERLKEDTSFGGNLGRAVFQAKKRLLEPLGLVEEAAKTAPGKKRPVEQSPQEPDSSAGIGKSGAQPAKKRLNFGQTGDTESVPDPQPIGEPPAAPSGVGSLTMASGGGAPVADNNEGADGVGSSSGNWHCDSQWLGDRVITTSTRTWALPTYNNHLYKQISNSTSGGSSNDNAYFGYSTPWGYFDFNRFHCHFSPRDWQRLINNNWGFRPKRLNFKLFNIQVKEVTDNNGVKTIANNLTSTVQVFTDSDYQLPYVLGSAHEGCLPPFPADVFMIPQYGYLTLNDGSQAVGRSSFYCLEYFPSQMLRTGNNFQFSYEFENVPFHSSYAHSQSLDRLMNPLIDQYLYYLSKTIDGHDSPHSKAQNQQTLKFSVAGPSNMAVQGRNYIPGPSYRQQRVSTTVTQNNNSEFAWPGASSWALNGRNSLMNPGPAMASHKEGEDRFFPLSGSLIFGKQGTGRDNVDADKVMITNEEEIKTTNPVATESYGQVATNHQSAQAQAQTGWVQNQGILPGMVWQDRDVYLQGPIWAKIPHTDGNFHPSPLMGGFGMKHPPPQILIKNTPVPADPPTAFNKDKLNSFITQYSTGQVSVEIEWELQKENSKRWNPEIQYTSNYYKSNNVEFAVNTEGVYSEPRPIGTRYLTRNL

SEQ ID NO: 45 - protein, 742 aa, synthetic construct
MAADGYLPDWLEDNLSEGIREWWALKPGAPQPKANQQHQDNARGLVLPGYKYLGPGNGLDKGEPVNAADAAALEHDKAYDQQLKAGDNPYLKYNHADAEFQERLKEDTSFGGNLGRAVFQAKKRLLEPLGLVEEAAKTAPGKKRPVEQSPQEPDSSAGIGKSGAQPAKKRLNFGQTGDTESVPDPQPIGEPPAAPSGVGSLTMASGGGAPVADNNEGADGVGSSSGNWHCDSQWLGDRVITTSTRTWALPTYNNHLYKQISNSTSGGSSNDNAYFGYSTPWGYFDFNRFHCHFSPRDWQRLINNNWGFRPKRLNFKLFNIQVKEVTDNNGVKTIANNLTSTVQVFTDSDYQLPYVLGSAHEGCLPPFPADVFMIPQYGYLTLNDGSQAVGRSSFYCLEYFPSQMLRTGNNFQFSYEFENVPFHSSYAHSQSLDRLMNPLIDQYLYYLSKTNNGHDSPHSKAQNQQTLKFSVAGPSNMAVQGRNYIPGPSYRQQRVSTTVTQNNNSEFAWPGASSWALNGRNSLMNPGPAMASHKEGEDRFFPLSGSLIFGKQGTGRDNVDADKVMITNEEEIKTTNPVATESYGQVATNHQSAQAQAQTGWVQNQGILPGMVWQDRDVYLQGPIWAKIPHTDGNFHPSPLMGGFGMKHPPPQILIKNTPVPADPPTAFNKDKLNSFITQYSTGQVSVEIEWELQKENSKRWNPEIQYTSNYYKSNNVEFAVNTEGVYSEPRPIGTRYLTRNL

SEQ ID NO: 46 - protein, 742 aa, synthetic construct
MAADGYLPDWLEDNLSEGIREWWALKPGAPQPKANQQHQDNARGLVLPGYKYLGPGNGLDKGEPVNAADAAALEHDKAYDQQLKAGDNPYLKYNHADAEFQERLKEDTSFGGNLGRAVFQAKKRLLEPLGLVEEAAKTAPGKKRPVEQSPQEPDSSAGIGKSGAQPAKKRLNFGQTGDTESVPDPQPIGEPPAAPSGVGSLTMASGGGAPVADNNEGADGVGSSSGNWHCDSQWLGDRVITTSTRTWALPTYNNHLYKQISNSTSGGSSNDNAYFGYSTPWGYFDFNRFHCHFSPRDWQRLINNNWGFRPKRLNFKLFNIQVKEVTDNNGVKTIANNLTSTVQVFTDSDYQLPYVLGSAHEGCLPPFPADVFMIPQYGYLTLNDGSQAVGRSSFYCLEYFPSQMLRTGNNFQFSYEFENVPFHSSYAHSQSLDRLMNPLIDQYLYYLSKTQRKSGSPHSKAQNQQTLKFSVAGPSNMAVQGRNYIPGPSYRQQRVSTTVTQNNNSEFAWPGASSWALNGRNSLMNPGPAMASHKEGEDRFFPLSGSLIFGKQGTGRDNVDADKVMITNEEEIKTTNPVATESYGQVATNHQSAQAQAQTGWVQNQGILPGMVWQDRDVYLQGPIWAKIPHTDGNFHPSPLMGGFGMKHPPPQILIKNTPVPADPPTAFNKDKLNSFITQYSTGQVSVEIEWELQKENSKRWNPEIQYTSNYYKSNNVEFAVNTEGVYSEPRPIGTRYLTRNL

SEQ ID NO: 47 - protein, 742 aa, synthetic construct
MAADGYLPDWLEDNLSEGIREWWALKPGAPQPKANQQHQDNARGLVLPGYKYLGPGNGLDKGEPVNAADAAALEHDKAYDQQLKAGDNPYLKYNHADAEFQERLKEDTSFGGNLGRAVFQAKKRLLEPLGLVEEAAKTAPGKKRPVEQSPQEPDSSAGIGKSGAQPAKKRLNFGQTGDTESVPDPQPIGEPPAAPSGVGSLTMASGGGAPVADNNEGADGVGSSSGNWHCDSQWLGDRVITTSTRTWALPTYNNHLYKQISNSTSGGSSNDNAYFGYSTPWGYFDFNRFHCHFSPRDWQRLINNNWGFRPKRLNFKLFNIQVKEVTDNNGVKTIANNLTSTVQVFTDSDYQLPYVLGSAHEGCLPPFPADVFMIPQYGYLTLNDGSQAVGRSSFYCLEYFPSQMLRTGNNFQFSYEFENVPFHSSYAHSQSLDRLMNPLIDQYLYYLSKTINGSGSPHSKAQARKTLKFSVAGPSNMAVQGRNYIPGPSYRQQRVSTTVTQNNNSEFAWPGASSWALNGRNSLMNPGPAMASHKEGEDRFFPLSGSLIFGKQGTGRDNVDADKVMITNEEEIKTTNPVATESYGQVATNHQSAQAQAQTGWVQNQGILPGMVWQDRDVYLQGPIWAKIPHTDGNFHPSPLMGGFGMKHPPPQILIKNTPVPADPPTAFNKDKLNSFITQYSTGQVSVEIEWELQKENSKRWNPEIQYTSNYYKSNNVEFAVNTEGVYSEPRPIGTRYLTRNL

SEQ ID NO: 48 - protein, 742 aa, synthetic construct
MAADGYLPDWLEDNLSEGIREWWALKPGAPQPKANQQHQDNARGLVLPGYKYLGPGNGLDKGEPVNAADAAALEHDKAYDQQLKAGDNPYLKYNHADAEFQERLKEDTSFGGNLGRAVFQAKKRLLEPLGLVEEAAKTAPGKKRPVEQSPQEPDSSAGIGKSGAQPAKKRLNFGQTGDTESVPDPQPIGEPPAAPSGVGSLTMASGGGAPVADNNEGADGVGSSSGNWHCDSQWLGDRVITTSTRTWALPTYNNHLYKQISNSTSGGSSNDNAYFGYSTPWGYFDFNRFHCHFSPRDWQRLINNNWGFRPKRLNFKLFNIQVKEVTDNNGVKTIANNLTSTVQVFTDSDYQLPYVLGSAHEGCLPPFPADVFMIPQYGYLTLNDGSQAVGRSSFYCLEYFPSQMLRTGNNFQFSYEFENVPFHSSYAHSQSLDRLMNPLIDQYLYYLSKYIVGSGSPHSKAQNQQTLKFSVAGPSNMAVQGRNYIPGPSYRQQRVSTTVTQNNNSEFAWPGASSWALNGRNSLMNPGPAMASHKEGEDRFFPLSGSLIFGKQGTGRDNVDADKVMITNEEEIKTTNPVATESYGQVATNHQSAQAQAQTGWVQNQGILPGMVWQDRDVYLQGPIWAKIPHTDGNFHPSPLMGGFGMKHPPPQILIKNTPVPADPPTAFNKDKLNSFITQYSTGQVSVEIEWELQKENSKRWNPEIQYTSNYYKSNNVEFAVNTEGVYSEPRPIGTRYLTRNL

SEQ ID NO: 49 - protein, 742 aa, synthetic construct
MAADGYLPDWLEDNLSEGIREWWALKPGAPQPKANQQHQDNARGLVLPGYKYLGPGNGLDKGEPVNAADAAALEHDKAYDQQLKAGDNPYLKYNHADAEFQERLKEDTSFGGNLGRAVFQAKKRLLEPLGLVEEAAKTAPGKKRPVEQSPQEPDSSAGIGKSGAQPAKKRLNFGQTGDTESVPDPQPIGEPPAAPSGVGSLTMASGGGAPVADNNEGADGVGSSSGNWHCDSQWLGDRVITTSTRTWALPTYNNHLYKQISNSTSGGSSNDNAYFGYSTPWGYFDFNRFHCHFSPRDWQRLINNNWGFRPKRLNFKLFNIQVKEVTDNNGVKTIANNLTSTVQVFTDSDYQLPYVLGSAHEGCLPPFPADVFMIPQYGYLTLNDGSQAVGRSSFYCLEYFPSQMLRTGNNFQFSYEFENVPFHSSYAHSQSLDRLMNPLIDQYLYYLSKTISKRGSPHSKAQNQQTLKFSVAGPSNMAVQGRNYIPGPSYRQQRVSTTVTQNNNSEFAWPGASSWALNGRNSLMNPGPAMASHKEGEDRFFPLSGSLIFGKQGTGRDNVDADKVMITNEEEIKTTNPVATESYGQVATNHQSAQAQAQTGWVQNQGILPGMVWQDRDVYLQGPIWAKIPHTDGNFHPSPLMGGFGMKHPPPQILIKNTPVPADPPTAFNKDKLNSFITQYSTGQVSVEIEWELQKENSKRWNPEIQYTSNYYKSNNVEFAVNTEGVYSEPRPIGTRYLTRNL

SEQ ID NO: 50 - protein, 742 aa, synthetic construct
MAADGYLPDWLEDNLSEGIREWWALKPGAPQPKANQQHQDNARGLVLPGYKYLGPGNGLDKGEPVNAADAAALEHDKAYDQQLKAGDNPYLKYNHADAEFQERLKEDTSFGGNLGRAVFQAKKRLLEPLGLVEEAAKTAPGKKRPVEQSPQEPDSSAGIGKSGAQPAKKRLNFGQTGDTESVPDPQPIGEPPAAPSGVGSLTMASGGGAPVADNNEGADGVGSSSGNWHCDSQWLGDRVITTSTRTWALPTYNNHLYKQISNSTSGGSSNDNAYFGYSTPWGYFDFNRFHCHFSPRDWQRLINNNWGFRPKRLNFKLFNIQVKEVTDNNGVKTIANNLTSTVQVFTDSDYQLPYVLGSAHEGCLPPFPADVFMIPQYGYLTLNDGSQAVGRSSFYCLEYFPSQMLRTGNNFQFSYEFENVPFHSSYAHSQSLDRLMNPLIDQYLYYLSKGLGGSGSPHSKAQNQQTLKFSVAGPSNMAVQGRNYIPGPSYRQQRVSTTVTQNNNSEFAWPGASSWALNGRNSLMNPGPAMASHKEGEDRFFPLSGSLIFGKQGTGRDNVDADKVMITNEEEIKTTNPVATESYGQVATNHQSAQAQAQTGWVQNQGILPGMVWQDRDVYLQGPIWAKIPHTDGNFHPSPLMGGFGMKHPPPQILIKNTPVPADPPTAFNKDKLNSFITQYSTGQVSVEIEWELQKENSKRWNPEIQYTSNYYKSNNVEFAVNTEGVYSEPRPIGTRYLTRNL

SEQ ID NO: 51 - protein, 742 aa, synthetic construct
MAADGYLPDWLEDNLSEGIREWWALKPGAPQPKANQQHQDNARGLVLPGYKYLGPGNGLDKGEPVNAADAAALEHDKAYDQQLKAGDNPYLKYNHADAEFQERLKEDTSFGGNLGRAVFQAKKRLLEPLGLVEEAAKTAPGKKRPVEQSPQEPDSSAGIGKSGAQPAKKRLNFGQTGDTESVPDPQPIGEPPAAPSGVGSLTMASGGGAPVADNNEGADGVGSSSGNWHCDSQWLGDRVITTSTRTWALPTYNNHLYKQISNSTSGGSSNDNAYFGYSTPWGYFDFNRFHCHFSPRDWQRLINNNWGFRPKRLNFKLFNIQVKEVTDNNGVKTIANNLTSTVQVFTDSDYQLPYVLGSAHEGCLPPFPADVFMIPQYGYLTLNDGSQAVGRSSFYCLEYFPSQMLRTGNNFQFSYEFENVPFHSSYAHSQSLDRLMNPLIDQYLYYLSKTINGHDSPHSKAQNLQTLKFSVAGPSNMAVQGRNYIPGPSYRQQRVSTTVTQNNNSEFAWPGASSWALNGRNSLMNPGPAMASHKEGEDRFFPLSGSLIFGKQGTGRDNVDADKVMITNEEEIKTTNPVATESYGQVATNHQSAQAQAQTGWVQNQGILPGMVWQDRDVYLQGPIWAKIPHTDGNFHPSPLMGGFGMKHPPPQILIKNTPVPADPPTAFNKDKLNSFITQYSTGQVSVEIEWELQKENSKRWNPEIQYTSNYYKSNNVEFAVNTEGVYSEPRPIGTRYLTRNL

SEQ ID NO: 52 - protein, 742 aa, synthetic construct
MAADGYLPDWLEDNLSEGIREWWALKPGAPQPKANQQHQDNARGLVLPGYKYLGPGNGLDKGEPVNAADAAALEHDKAYDQQLKAGDNPYLKYNHADAEFQERLKEDTSFGGNLGRAVFQAKKRLLEPLGLVEEAAKTAPGKKRPVEQSPQEPDSSAGIGKSGAQPAKKRLNFGQTGDTESVPDPQPIGEPPAAPSGVGSLTMASGGGAPVADNNEGADGVGSSSGNWHCDSQWLGDRVITTSTRTWALPTYNNHLYKQISNSTSGGSSNDNAYFGYSTPWGYFDFNRFHCHFSPRDWQRLINNNWGFRPKRLNFKLFNIQVKEVTDNNGVKTIANNLTSTVQVFTDSDYQLPYVLGSAHEGCLPPFPADVFMIPQYGYLTLNDGSQAVGRSSFYCLEYFPSQMLRTGNNFQFSYEFENVPFHSSYAHSQSLDRLMNPLIDQYLYYLSKTVNGHDSPHSKAQNQQTLKFSVAGPSNMAVQGRNYIPGPSYRQQRVSTTVTQNNNSEFAWPGASSWALNGRNSLMNPGPAMASHKEGEDRFFPLSGSLIFGKQGTGRDNVDADKVMITNEEEIKTTNPVATESYGQVATNHQSAQAQAQTGWVQNQGILPGMVWQDRDVYLQGPIWAKIPHTDGNFHPSPLMGGFGMKHPPPQILIKNTPVPADPPTAFNKDKLNSFITQYSTGQVSVEIEWELQKENSKRWNPEIQYTSNYYKSNNVEFAVNTEGVYSEPRPIGTRYLTRNL

SEQ ID NO: 53 - protein, 742 aa, synthetic construct
MAADGYLPDWLEDNLSEGIREWWALKPGAPQPKANQQHQDNARGLVLPGYKYLGPGNGLDKGEPVNAADAAALEHDKAYDQQLKAGDNPYLKYNHADAEFQERLKEDTSFGGNLGRAVFQAKKRLLEPLGLVEEAAKTAPGKKRPVEQSPQEPDSSAGIGKSGAQPAKKRLNFGQTGDTESVPDPQPIGEPPAAPSGVGSLTMASGGGAPVADNNEGADGVGSSSGNWHCDSQWLGDRVITTSTRTWALPTYNNHLYKQISNSTSGGSSNDNAYFGYSTPWGYFDFNRFHCHFSPRDWQRLINNNWGFRPKRLNFKLFNIQVKEVTDNNGVKTIANNLTSTVQVFTDSDYQLPYVLGSAHEGCLPPFPADVFMIPQYGYLTLNDGSQAVGRSSFYCLEYFPSQMLRTGNNFQFSYEFENVPFHSSYAHSQSLDRLMNPLIDQYLYYLSKTINGHDSPHSKALNQQTLKFSVAGPSNMAVQGRNYIPGPSYRQQRVSTTVTQNNNSEFAWPGASSWALNGRNSLMNPGPAMASHKEGEDRFFPLSGSLIFGKQGTGRDNVDADKVMITNEEEIKTTNPVATESYGQVATNHQSAQAQAQTGWVQNQGILPGMVWQDRDVYLQGPIWAKIPHTDGNFHPSPLMGGFGMKHPPPQILIKNTPVPADPPTAFNKDKLNSFITQYSTGQVSVEIEWELQKENSKRWNPEIQYTSNYYKSNNVEFAVNTEGVYSEPRPIGTRYLTRNL

SEQ ID NO: 54 - protein, 742 aa, synthetic construct
MAADGYLPDWLEDNLSEGIREWWALKPGAPQPKANQQHQDNARGLVLPGYKYLGPGNGLDKGEPVNAADAAALEHDKAYDQQLKAGDNPYLKYNHADAEFQERLKEDTSFGGNLGRAVFQAKKRLLEPLGLVEEAAKTAPGKKRPVEQSPQEPDSSAGIGKSGAQPAKKRLNFGQTGDTESVPDPQPIGEPPAAPSGVGSLTMASGGGAPVADNNEGADGVGSSSGNWHCDSQWLGDRVITTSTRTWALPTYNNHLYKQISNSTSGGSSNDNAYFGYSTPWGYFDFNRFHCHFSPRDWQRLINNNWGFRPKRLNFKLFNIQVKEVTDNNGVKTIANNLTSTVQVFTDSDYQLPYVLGSAHEGCLPPFPADVFMIPQYGYLTLNDGSQAVGRSSFYCLEYFPSQMLRTGNNFQFSYEFENVPFHSSYAHSQSLDRLMNPLIDQYLYYLSKTINGHDSPHSKAQNQQSLKFSVAGPSNMAVQGRNYIPGPSYRQQRVSTTVTQNNNSEFAWPGASSWALNGRNSLMNPGPAMASHKEGEDRFFPLSGSLIFGKQGTGRDNVDADKVMITNEEEIKTTNPVATESYGQVATNHQSAQAQAQTGWVQNQGILPGMVWQDRDVYLQGPIWAKIPHTDGNFHPSPLMGGFGMKHPPPQILIKNTPVPADPPTAFNKDKLNSFITQYSTGQVSVEIEWELQKENSKRWNPEIQYTSNYYKSNNVEFAVNTEGVYSEPRPIGTRYLTRNL

SEQ ID NO: 55 - protein, 742 aa, synthetic construct
MAADGYLPDWLEDNLSEGIREWWALKPGAPQPKANQQHQDNARGLVLPGYKYLGPGNGLDKGEPVNAADAAALEHDKAYDQQLKAGDNPYLKYNHADAEFQERLKEDTSFGGNLGRAVFQAKKRLLEPLGLVEEAAKTAPGKKRPVEQSPQEPDSSAGIGKSGAQPAKKRLNFGQTGDTESVPDPQPIGEPPAAPSGVGSLTMASGGGAPVADNNEGADGVGSSSGNWHCDSQWLGDRVITTSTRTWALPTYNNHLYKQISNSTSGGSSNDNAYFGYSTPWGYFDFNRFHCHFSPRDWQRLINNNWGFRPKRLNFKLFNIQVKEVTDNNGVKTIANNLTSTVQVFTDSDYQLPYVLGSAHEGCLPPFPADVFMIPQYGYLTLNDGSQAVGRSSFYCLEYFPSQMLRTGNNFQFSYEFENVPFHSSYAHSQSLDRLMNPLIDQYLYYLSKTINGHDSPHSKAQNQQILKFSVAGPSNMAVQGRNYIPGPSYRQQRVSTTVTQNNNSEFAWPGASSWALNGRNSLMNPGPAMASHKEGEDRFFPLSGSLIFGKQGTGRDNVDADKVMITNEEEIKTTNPVATESYGQVATNHQSAQAQAQTGWVQNQGILPGMVWQDRDVYLQGPIWAKIPHTDGNFHPSPLMGGFGMKHPPPQILIKNTPVPADPPTAFNKDKLNSFITQYSTGQVSVEIEWELQKENSKRWNPEIQYTSNYYKSNNVEFAVNTEGVYSEPRPIGTRYLTRNL

SEQ ID NO: 56 - protein, 742 aa, synthetic construct
MAADGYLPDWLEDNLSEGIREWWALKPGAPQPKANQQHQDNARGLVLPGYKYLGPGNGLDKGEPVNAADAAALEHDKAYDQQLKAGDNPYLKYNHADAEFQERLKEDTSFGGNLGRAVFQAKKRLLEPLGLVEEAAKTAPGKKRPVEQSPQEPDSSAGIGKSGAQPAKKRLNFGQTGDTESVPDPQPIGEPPAAPSGVGSLTMASGGGAPVADNNEGADGVGSSSGNWHCDSQWLGDRVITTSTRTWALPTYNNHLYKQISNSTSGGSSNDNAYFGYSTPWGYFDFNRFHCHFSPRDWQRLINNNWGFRPKRLNFKLFNIQVKEVTDNNGVKTIANNLTSTVQVFTDSDYQLPYVLGSAHEGCLPPFPADVFMIPQYGYLTLNDGSQAVGRSSFYCLEYFPSQMLRTGNNFQFSYEFENVPFHSSYAHSQSLDRLMNPLIDQYLYYLSKTINGSGSPHFTRQNQQTLKFSVAGPSNMAVQGRNYIPGPSYRQQRVSTTVTQNNNSEFAWPGASSWALNGRNSLMNPGPAMASHKEGEDRFFPLSGSLIFGKQGTGRDNVDADKVMITNEEEIKTTNPVATESYGQVATNHQSAQAQAQTGWVQNQGILPGMVWQDRDVYLQGPIWAKIPHTDGNFHPSPLMGGFGMKHPPPQILIKNTPVPADPPTAFNKDKLNSFITQYSTGQVSVEIEWELQKENSKRWNPEIQYTSNYYKSNNVEFAVNTEGVYSEPRPIGTRYLTRNL

SEQ ID NO: 57 - protein, 742 aa, synthetic construct
MAADGYLPDWLEDNLSEGIREWWALKPGAPQPKANQQHQDNARGLVLPGYKYLGPGNGLDKGEPVNAADAAALEHDKAYDQQLKAGDNPYLKYNHADAEFQERLKEDTSFGGNLGRAVFQAKKRLLEPLGLVEEAAKTAPGKKRPVEQSPQEPDSSAGIGKSGAQPAKKRLNFGQTGDTESVPDPQPIGEPPAAPSGVGSLTMASGGGAPVADNNEGADGVGSSSGNWHCDSQWLGDRVITTSTRTWALPTYNNHLYKQISNSTSGGSSNDNAYFGYSTPWGYFDFNRFHCHFSPRDWQRLINNNWGFRPKRLNFKLFNIQVKEVTDNNGVKTIANNLTSTVQVFTDSDYQLPYVLGSAHEGCLPPFPADVFMIPQYGYLTLNDGSQAVGRSSFYCLEYFPSQMLRTGNNFQFSYEFENVPFHSSYAHSQSLDRLMNPLIDQYLYYLSKTSNGHDSPHSKAQNQQTLKFSVAGPSNMAVQGRNYIPGPSYRQQRVSTTVTQNNNSEFAWPGASSWALNGRNSLMNPGPAMASHKEGEDRFFPLSGSLIFGKQGTGRDNVDADKVMITNEEEIKTTNPVATESYGQVATNHQSAQAQAQTGWVQNQGILPGMVWQDRDVYLQGPIWAKIPHTDGNFHPSPLMGGFGMKHPPPQILIKNTPVPADPPTAFNKDKLNSFITQYSTGQVSVEIEWELQKENSKRWNPEIQYTSNYYKSNNVEFAVNTEGVYSEPRPIGTRYLTRNL

SEQ ID NO: 58 - protein, 742 aa, synthetic construct
MAADGYLPDWLEDNLSEGIREWWALKPGAPQPKANQQHQDNARGLVLPGYKYLGPGNGLDKGEPVNAADAAALEHDKAYDQQLKAGDNPYLKYNHADAEFQERLKEDTSFGGNLGRAVFQAKKRLLEPLGLVEEAAKTAPGKKRPVEQSPQEPDSSAGIGKSGAQPAKKRLNFGQTGDTESVPDPQPIGEPPAAPSGVGSLTMASGGGAPVADNNEGADGVGSSSGNWHCDSQWLGDRVITTSTRTWALPTYNNHLYKQISNSTSGGSSNDNAYFGYSTPWGYFDFNRFHCHFSPRDWQRLINNNWGFRPKRLNFKLFNIQVKEVTDNNGVKTIANNLTSTVQVFTDSDYQLPYVLGSAHEGCLPPFPADVFMIPQYGYLTLNDGSQAVGRSSFYCLEYFPSQMLRTGNNFQFSYEFENVPFHSSYAHSQSLDRLMNPLIDQYLYYLSKTINGSGSPHSLPWNQQTLKFSVAGPSNMAVQGRNYIPGPSYRQQRVSTTVTQNNNSEFAWPGASSWALNGRNSLMNPGPAMASHKEGEDRFFPLSGSLIFGKQGTGRDNVDADKVMITNEEEIKTTNPVATESYGQVATNHQSAQAQAQTGWVQNQGILPGMVWQDRDVYLQGPIWAKIPHTDGNFHPSPLMGGFGMKHPPPQILIKNTPVPADPPTAFNKDKLNSFITQYSTGQVSVEIEWELQKENSKRWNPEIQYTSNYYKSNNVEFAVNTEGVYSEPRPIGTRYLTRNL

SEQ ID NO: 59 - protein, 742 aa, synthetic construct
MAADGYLPDWLEDNLSEGIREWWALKPGAPQPKANQQHQDNARGLVLPGYKYLGPGNGLDKGEPVNAADAAALEHDKAYDQQLKAGDNPYLKYNHADAEFQERLKEDTSFGGNLGRAVFQAKKRLLEPLGLVEEAAKTAPGKKRPVEQSPQEPDSSAGIGKSGAQPAKKRLNFGQTGDTESVPDPQPIGEPPAAPSGVGSLTMASGGGAPVADNNEGADGVGSSSGNWHCDSQWLGDRVITTSTRTWALPTYNNHLYKQISNSTSGGSSNDNAYFGYSTPWGYFDFNRFHCHFSPRDWQRLINNNWGFRPKRLNFKLFNIQVKEVTDNNGVKTIANNLTSTVQVFTDSDYQLPYVLGSAHEGCLPPFPADVFMIPQYGYLTLNDGSQAVGRSSFYCLEYFPSQMLRTGNNFQFSYEFENVPFHSSYAHSQSLDRLMNPLIDQYLYYLSKTINGHDSPHSKAQNHQTLKFSVAGPSNMAVQGRNYIPGPSYRQQRVSTTVTQNNNSEFAWPGASSWALNGRNSLMNPGPAMASHKEGEDRFFPLSGSLIFGKQGTGRDNVDADKVMITNEEEIKTTNPVATESYGQVATNHQSAQAQAQTGWVQNQGILPGMVWQDRDVYLQGPIWAKIPHTDGNFHPSPLMGGFGMKHPPPQILIKNTPVPADPPTAFNKDKLNSFITQYSTGQVSVEIEWELQKENSKRWNPEIQYTSNYYKSNNVEFAVNTEGVYSEPRPIGTRYLTRNL

SEQ ID NO: 60-136 - skipped (77 entries)

SEQ ID NO: 137 - DNA, 2211 bp, Adeno-associated virus 9
  source 1..2211: mol_type = genomic DNA
atggctgccgatggttatcttccagattggctcgaggacaaccttagtgaaggaattcgcgagtggtgggctttgaaacctggagcccctcaacccaaggcaaatcaacaacatcaagacaacgctcgaggtcttgtgcttccgggttacaaataccttggacccggcaacggactcgacaagggggagccggtcaacgcagcagacgcggcggccctcgagcacgacaaggcctacgaccagcagctcaaggccggagacaacccgtacctcaagtacaaccacgccgacgccgagttccaggagcggctcaaagaagatacgtcttttgggggcaacctcgggcgagcagtcttccaggccaaaaagaggcttcttgaacctcttggtctggttgaggaagcggctaagacggctcctggaaagaagaggcctgtagagcagtctcctcaggaaccggactcctccgcgggtattggcaaatcgggtgcacagcccgctaaaaagagactcaatttcggtcagactggcgacacagagtcagtcccagaccctcaaccaatcggagaacctcccgcagccccctcaggtgtgggatctcttacaatggcttcaggtggtggcgcaccagtggcagacaataacgaaggtgccgatggagtgggtagttcctcgggaaattggcattgcgattcccaatggctgggggacagagtcatcaccaccagcacccgaacctgggccctgcccacctacaacaatcacctctacaagcaaatctccaacagcacatctggaggatcttcaaatgacaacgcctacttcggctacagcaccccctgggggtattttgacttcaacagattccactgccacttctcaccacgtgactggcagcgactcatcaacaacaactggggattccggcctaagcgactcaacttcaagctcttcaacattcaggtcaaagaggttacggacaacaatggagtcaagaccatcgccaataaccttaccagcacggtccaggtcttcacggactcagactatcagctcccgtacgtgctcgggtcggctcacgagggctgcctcccgccgttcccagcggacgttttcatgattcctcagtacgggtatctgacgcttaatgatggaagccaggccgtgggtcgttcgtccttttactgcctggaatatttcccgtcgcaaatgctaagaacgggtaacaacttccagttcagctacgagtttgagaacgtacctttccatagcagctacgctcacagccaaagcctggaccgactaatgaatccactcatcgaccaatacttgtactatctctcaaagactattaacggttctggacagaatcaacaaacgctaaaattcagtgtggccggacccagcaacatggctgtccagggaagaaactacatacctggacccagctaccgacaacaacgtgtctcaaccactgtgactcaaaacaacaacagcgaatttgcttggcctggagcttcttcttgggctctcaatggacgtaatagcttgatgaatcctggacctgctatggccagccacaaagaaggagaggaccgtttctttcctttgtctggatctttaatttttggcaaacaaggaactggaagagacaacgtggatgcggacaaagtcatgataaccaacgaagaagaaattaaaactactaacccggtagcaacggagtcctatggacaagtggccacaaaccaccagagtgcccaagcacaggcgcagaccggctgggttcaaaaccaaggaatacttccgggtatggtttggcaggacagagatgtgtacctgcaaggacccatttgggccaaaattcctcacacggacggcaactttcacccttctccgctgatgggagggtttggaatgaagcacccgcctcctcagatcctcatcaaaaacacacctgtacctgcggatcctccaacggccttcaacaaggacaagctgaactctttcatcacccagtattctactggccaagtcagcgtggagatcgagtgggagctgcagaaggaaaacagcaagcgctggaacccggagatccagtacacttccaactattacaagtctaataatgttgaatttgctgttaatactgaaggtgtatatagtgaaccccgccccattggcaccagatacctgactcgtaatctgtaa

SEQ ID NO: 138 - protein, 736 aa, Adeno-associated virus 9
MAADGYLPDWLEDNLSEGIREWWALKPGAPQPKANQQHQDNARGLVLPGYKYLGPGNGLDKGEPVNAADAAALEHDKAYDQQLKAGDNPYLKYNHADAEFQERLKEDTSFGGNLGRAVFQAKKRLLEPLGLVEEAAKTAPGKKRPVEQSPQEPDSSAGIGKSGAQPAKKRLNFGQTGDTESVPDPQPIGEPPAAPSGVGSLTMASGGGAPVADNNEGADGVGSSSGNWHCDSQWLGDRVITTSTRTWALPTYNNHLYKQISNSTSGGSSNDNAYFGYSTPWGYFDFNRFHCHFSPRDWQRLINNNWGFRPKRLNFKLFNIQVKEVTDNNGVKTIANNLTSTVQVFTDSDYQLPYVLGSAHEGCLPPFPADVFMIPQYGYLTLNDGSQAVGRSSFYCLEYFPSQMLRTGNNFQFSYEFENVPFHSSYAHSQSLDRLMNPLIDQYLYYLSKTINGSGQNQQTLKFSVAGPSNMAVQGRNYIPGPSYRQQRVSTTVTQNNNSEFAWPGASSWALNGRNSLMNPGPAMASHKEGEDRFFPLSGSLIFGKQGTGRDNVDADKVMITNEEEIKTTNPVATESYGQVATNHQSAQAQAQTGWVQNQGILPGMVWQDRDVYLQGPIWAKIPHTDGNFHPSPLMGGFGMKHPPPQILIKNTPVPADPPTAFNKDKLNSFITQYSTGQVSVEIEWELQKENSKRWNPEIQYTSNYYKSNNVEFAVNTEGVYSEPRPIGTRYLTRNL

SEQ ID NO: 139-199 - skipped (61 entries)

SEQ ID NO: 200 - protein, 14 aa, synthetic construct
GSGSPHSKAQNQQT

SEQ ID NO: 201 - protein, 14 aa, synthetic construct
GHDSPHKSGQNQQT

SEQ ID NO: 202 - protein, 14 aa, synthetic construct
GSGSPHARMQNQQT

SEQ ID NO: 203 - protein, 14 aa, synthetic construct
GSGSPHVKSQNQQT

SEQ ID NO: 204 - protein, 14 aa, synthetic construct
GQDSPHKSGQNQQT

SEQ ID NO: 205 - protein, 14 aa, synthetic construct
GSGSPHASRQNQQT

SEQ ID NO: 206 - protein, 14 aa, synthetic construct
GSGSPHASRQNKQT

SEQ ID NO: 207 - protein, 14 aa, synthetic construct
GSGSPHVKIQNQQT

SEQ ID NO: 208 - protein, 14 aa, synthetic construct
GSGSPHSKAKNQQT

SEQ ID NO: 209 - protein, 14 aa, synthetic construct
GSGSPHKKNQNQQT

SEQ ID NO: 210 - protein, 14 aa, synthetic construct
GSGSPHVRMQNQQT

SEQ ID NO: 211 - protein, 14 aa, synthetic construct
GSGSPHASRQKQQT

SEQ ID NO: 212 - protein, 14 aa, synthetic construct
GHSSPHRSGQNQQT

SEQ ID NO: 213 - protein, 14 aa, synthetic construct
GMRTYHLSGQNQQT

SEQ ID NO: 214 - protein, 14 aa, synthetic construct
GSGSPHTRGQNQQT

SEQ ID NO: 215 - protein, 14 aa, synthetic construct
GSGIIPVSSQNQQT

SEQ ID NO: 216 - protein, 14 aa, synthetic construct
GSEYGHKSGQNQQT

SEQ ID NO: 217 - protein, 14 aa, synthetic construct
GRGQNVSSVHRQQT

SEQ ID NO: 218 - protein, 14 aa, synthetic construct
GSSHRFYGGQNQQT

SEQ ID NO: 219 - protein, 14 aa, synthetic construct
GYFVAAWSGQNQQT

SEQ ID NO: 220 - protein, 14 aa, synthetic construct
GSVLHSHAAQNQQT

SEQ ID NO: 221 - protein, 14 aa, synthetic construct
GSGDLVVSTQNQQT

SEQ ID NO: 222 - protein, 14 aa, synthetic construct
GSYGMAASGQNQQT

SEQ ID NO: 223 - protein, 14 aa, synthetic construct
GLNHFGASGQNQQT

SEQ ID NO: 224 - protein, 14 aa, synthetic construct
GSTGSHSAGQNQHT

SEQ ID NO: 225 - protein, 14 aa, synthetic construct
GLAGHTVSGQNQQT

SEQ ID NO: 226 - protein, 14 aa, synthetic construct
GIILGASSGQNQQT

SEQ ID NO: 227 - protein, 14 aa, synthetic construct
GSGVSTYNIQNQQT

SEQ ID NO: 228 - protein, 14 aa, synthetic construct
GSLVSVQTGQNQQT

SEQ ID NO: 229 - protein, 14 aa, synthetic construct
GQSSPHRSGQNQQT

SEQ ID NO: 230 - protein, 14 aa, synthetic construct
GREYGHKSGQNQQT

SEQ ID NO: 231 - protein, 14 aa, synthetic construct
GHTLTLSSGQNQQT

SEQ ID NO: 232 - protein, 14 aa, synthetic construct
GSITLIPSGQNQQT

SEQ ID NO: 233 - protein, 14 aa, synthetic construct
GSNGFTALGQNQQT

SEQ ID NO: 234 - protein, 14 aa, synthetic construct
GSGHSSHSVQNQQT

SEQ ID NO: 235 - protein, 14 aa, synthetic construct
GSGIPQRSGKNQQT

SEQ ID NO: 236 - protein, 14 aa, synthetic construct
GSGDTLHMLQNQQT

SEQ ID NO: 237 - protein, 14 aa, synthetic construct
GERHTVLSGQNQQT

SEQ ID NO: 238 - protein, 14 aa, synthetic construct
GSGMPQSHIQNQQT

SEQ ID NO: 239 - protein, 14 aa, synthetic construct
GSGQLSGIGGNQQT

SEQ ID NO: 240 - protein, 14 aa, synthetic construct
GSGQNRKPASFAQT

SEQ ID NO: 241 - protein, 14 aa, synthetic construct
GSGSVSQLGQNQQT

SEQ ID NO: 242 - protein, 14 aa, synthetic construct
GSDFLGTHGQNQQT

SEQ ID NO: 243 - protein, 14 aa, synthetic construct
GQIVQNPSGQNQQT

SEQ ID NO: 244 - protein, 14 aa, synthetic construct
GSGTQIPSQQNQQT

SEQ ID NO: 245 - protein, 14 aa, synthetic construct
GSGQNQQSAREGLT

SEQ ID NO: 246 - protein, 14 aa, synthetic construct
GSGLGMSTGQNQQT

SEQ ID NO: 247 - protein, 14 aa, synthetic construct
GSGLPVLSGQNQQT

SEQ ID NO: 248 - protein, 14 aa, synthetic construct
GSGHSIRTDQNQQT

SEQ ID NO: 249 - protein, 14 aa, synthetic construct
GSGQSVQTVVNQQT

SEQ ID NO: 250 - protein, 14 aa, synthetic construct
GSGQNRAQSRFQQT

SEQ ID NO: 251 - protein, 14 aa, synthetic construct
GGGDLGRSSQNQQT

SEQ ID NO: 252 - protein, 14 aa, synthetic construct
GGGTKMDSGQNQQT

SEQ ID NO: 253 - protein, 14 aa, synthetic construct
GSGSPHPSRQNQQT

SEQ ID NO: 254 - protein, 14 aa, synthetic construct
GSGQFTNAGMNQQT

SEQ ID NO: 255 - protein, 14 aa, synthetic construct
GGRNGHTVGQNQQT

SEQ ID NO: 256 - protein, 14 aa, synthetic construct
GSGFGPQTGQNQQT

SEQ ID NO: 257 - protein, 14 aa, synthetic construct
GRTDSHTSGQNQQT

SEQ ID NO: 258 - protein, 14 aa, synthetic construct
GYEVLGSSGQNQQT

SEQ ID NO: 259 - protein, 14 aa, synthetic construct
GSVHLSVTGQNQQT

SEQ ID NO: 260 - protein, 14 aa, synthetic construct
GFMSYKGSGQNQQT

SEQ ID NO: 261 - protein, 14 aa, synthetic construct
GNIAGSVSGQNQQT

SEQ ID NO: 262 - protein, 14 aa, synthetic construct
GSGSHRDVSQNQQT

SEQ ID NO: 263 - protein, 14 aa, synthetic construct
GGLGSMSSGQNQQT

SEQ ID NO: 264 - protein, 14 aa, synthetic construct
GSGHLPQSAQNQQT

SEQ ID NO: 265 - protein, 14 aa, synthetic construct
GGVLVGGSGQNQQT

SEQ ID NO: 266 - protein, 14 aa, synthetic construct
GTHPYTSSGQNQQT

SEQ ID NO: 267 - protein, 14 aa, synthetic construct
GSGQNQQLKENRST

SEQ ID NO: 268 - protein, 14 aa, synthetic construct
GSGQNQQTSPHNHT

SEQ ID NO: 269 - protein, 14 aa, synthetic construct
GSGTLYPQSQNQQT

SEQ ID NO: 270 - protein, 14 aa, synthetic construct
GSGQNQQSNWITKT

SEQ ID NO: 271 - protein, 14 aa, synthetic construct
GSGYTSLFLQNQQT

SEQ ID NO: 272 - protein, 14 aa, synthetic construct
GSGVMTHVLQNQQT

SEQ ID NO: 273 - protein, 14 aa, synthetic construct
GSVSDVRAGQNQQT

SEQ ID NO: 274 - protein, 14 aa, synthetic construct
GSGQSHMATLNQQT

SEQ ID NO: 275 - protein, 14 aa, synthetic construct
GSGLSVHLAQNQQT

SEQ ID NO: 276 - protein, 14 aa, synthetic construct
GSGLSHATQQNQQT

SEQ ID NO: 277 - protein, 14 aa, synthetic construct
GSGLSVQSGQNQQT

SEQ ID NO: 278 - protein, 14 aa, synthetic construct
GSGHMTYREKNQQT

SEQ ID NO: 279 - protein, 14 aa, synthetic construct
GSKGVPTPGQNQQT

SEQ ID NO: 280 - protein, 14 aa, synthetic construct
GSGLLPLSSQNQQT

SEQ ID NO: 281 - protein, 14 aa, synthetic construct
GNGLYAVSGQNQQT

SEQ ID NO: 282 - protein, 14 aa, synthetic construct
GFNGSPSSGQNQQT

SEQ ID NO: 283 - protein, 14 aa, synthetic construct
GSGQIRHSDQNQQT

SEQ ID NO: 284 - protein, 14 aa, synthetic construct
GGQVAPSSGQNQQT

SEQ ID NO: 285 - protein, 14 aa, synthetic construct
GSFSMHTHGQNQQT

SEQ ID NO: 286 - protein, 14 aa, synthetic construct
GSGQNQQVIQGSNT

SEQ ID NO: 287 - protein, 14 aa, synthetic construct
GRVLHSHAGQNQQT

SEQ ID NO: 288 - protein, 14 aa, synthetic construct
GSGQNQQTSLQDQT

SEQ ID NO: 289 - protein, 14 aa, synthetic construct
GSGLGRAPVQNQQT

SEQ ID NO: 290 - protein, 14 aa, synthetic construct
GNGFSSASGQNQQT

SEQ ID NO: 291 - protein, 14 aa, synthetic construct
GSGQMASRESNQQT

SEQ ID NO: 292 - protein, 14 aa, synthetic construct
GPGLPNHSGQNQQT

SEQ ID NO: 293 - protein, 14 aa, synthetic construct
GNIQWQGSGQNQQT

SEQ ID NO: 294 - protein, 14 aa, synthetic construct
GMSAHMSSGQNQQT

SEQ ID NO: 295 - protein, 14 aa, synthetic construct
GHSFVNRSGQNQQT

SEQ ID NO: 296 - protein, 14 aa, synthetic construct
GRAVMDHSGQNQQT

SEQ ID NO: 297 - protein, 14 aa, synthetic construct
GALTVMQSGQNQQT

SEQ ID NO: 298 - protein, 14 aa, synthetic construct
GSGQRSPVLPNQQT

SEQ ID NO: 299 - protein, 14 aa, synthetic construct
GSGQNGHLSLKQQT

SEQ ID NO: 300 - protein, 14 aa, synthetic construct
GSLPRGTSDQNQQT

SEQ ID NO: 301 - protein, 14 aa, synthetic construct
GVAGSLVSGQNQQT

SEQ ID NO: 302 - protein, 14 aa, synthetic construct
GRGGIPQSGQNQQT

SEQ ID NO: 303 - protein, 14 aa, synthetic construct
GSGQYASSIPNQQT

SEQ ID NO: 304 - protein, 14 aa, synthetic construct
GTDFGRQSSQNQQT

SEQ ID NO: 305 - protein, 14 aa, synthetic construct
GIFMQTPSGQNQQT

SEQ ID NO: 306 - protein, 14 aa, synthetic construct
GSGQNQQTRLVDLT

SEQ ID NO: 307 - protein, 14 aa, synthetic construct
GTREMPLSGQNQQT

SEQ ID NO: 308 - protein, 14 aa, synthetic construct
GSRLVHVHGQNQQT

SEQ ID NO: 309 - protein, 14 aa, synthetic construct
GSGRLVPNGPNQQT

SEQ ID NO: 310 - protein, 14 aa, synthetic construct
GSGYLRESPQNQQT

SEQ ID NO: 311 - protein, 14 aa, synthetic construct
GARIQNASGQKQQT

SEQ ID NO: 312 - protein, 14 aa, synthetic construct
GLSNPMPSGQNQQT

SEQ ID NO: 313 - protein, 14 aa, synthetic construct
GSTVQDTRGQNQQT

SEQ ID NO: 314 - protein, 14 aa, synthetic construct
GPFGMPSSGQNQQT

SEQ ID NO: 315 - protein, 14 aa, synthetic construct
GSGQNHGVLSNQQT

SEQ ID NO: 316 - protein, 14 aa, synthetic construct
GSGYSMSQAQNQQT

SEQ ID NO: 317 - protein, 14 aa, synthetic construct
GSGMLTHTLQNQQT

SEQ ID NO: 318 - protein, 14 aa, synthetic construct
GRGSPHASRQNQQT

SEQ ID NO: 319 - protein, 14 aa, synthetic construct
GLSWPSTSGQNQQT

SEQ ID NO: 320 - protein, 14 aa, synthetic construct
GNSMERTSGQNQQT

SEQ ID NO: 321 - protein, 14 aa, synthetic construct
GSGMSPSTLQNQQT

SEQ ID NO: 322 - protein, 14 aa, synthetic construct
GSGHGQVLSQNQQT

SEQ ID NO: 323 - protein, 14 aa, synthetic construct
GRGQIYSTGGNQQT

SEQ ID NO: 324 - protein, 14 aa, synthetic construct
GVVAAHNSGQNQQT

SEQ ID NO: 325 - protein, 14 aa, synthetic construct
GDSSLRHSGQNQQT

SEQ ID NO: 326 - protein, 14 aa, synthetic construct
GSLVSQGAGQNQQT

SEQ ID NO: 327 - protein, 14 aa, synthetic construct
GSLLQAHSGQNQQT

SEQ ID NO: 328 - protein, 14 aa, synthetic construct
GSGHIYVGIQNQQT

SEQ ID NO: 329 - protein, 14 aa, synthetic construct
GHHTTVQSGQNQQT

SEQ ID NO: 330 - protein, 14 aa, synthetic construct
GSRQSKRNELNQQT

SEQ ID NO: 331 - protein, 14 aa, synthetic construct
GSGQNQQHVSSPRT

SEQ ID NO: 332 - protein, 14 aa, synthetic construct
GSSKELLWGQNQQT

SEQ ID NO: 333 - protein, 14 aa, synthetic construct
GSLSTPSSGQNQQT

SEQ ID NO: 334 - protein, 14 aa, synthetic construct
GSIGYAGQGQNQQT

SEQ ID NO: 335 - protein, 14 aa, synthetic construct
GSGQNQRVSNSQQT

SEQ ID NO: 336 - protein, 14 aa, synthetic construct
GSGYASHVQQNQQT

SEQ ID NO: 337 - protein, 14 aa, synthetic construct
GSGEYSRSGQNQQT

SEQ ID NO: 338 - protein, 14 aa, synthetic construct
GSVSTHSSGQNQQT

SEQ ID NO: 339 - protein, 14 aa, synthetic construct
GSGQNQHSLGNYQT

SEQ ID NO: 340 - protein, 14 aa, synthetic construct
GSGGLDTRGQNQQT

SEQ ID NO: 341 - protein, 14 aa, synthetic construct
GNILHATSGQNQQT

SEQ ID NO: 342 - protein, 14 aa, synthetic construct
GSGQSYTMTQNQQT

SEQ ID NO: 343 - protein, 14 aa, synthetic construct
GSGQNQHSAPNSQT

SEQ ID NO: 344 - protein, 14 aa, synthetic construct
GSGQNQQTMDHNRT

SEQ ID NO: 345 - protein, 14 aa, synthetic construct
GSNGGVGTGQNQQT

SEQ ID NO: 346 - protein, 14 aa, synthetic construct
GAGSIIPSGQNQQT

SEQ ID NO: 347 - protein, 14 aa, synthetic construct
GSGQTHGGQHNQQT

SEQ ID NO: 348 - protein, 14 aa, synthetic construct
GSNLSFQSGQNQQT

SEQ ID NO: 349 - protein, 14 aa, synthetic construct
GATLQVHSGQNQQT

SEQ ID NO: 350 - protein, 14 aa, synthetic construct
GSGFNQRSEQNQQT

SEQ ID NO: 351 - protein, 14 aa, synthetic construct
GSGSLRDFDQNQQT

SEQ ID NO: 352 - protein, 14 aa, synthetic construct
GSGDSITGKQNQQT

SEQ ID NO: 353 - protein, 14 aa, synthetic construct
GSGQDRNIVQNQQT

SEQ ID NO: 354 - protein, 14 aa, synthetic construct
GSGLSHSHQQNQQT

SEQ ID NO: 355 - protein, 14 aa, synthetic construct
GSGQNQQTGMSSVK

SEQ ID NO: 356 - protein, 14 aa, synthetic construct
GSVTHGISGQNQQT

SEQ ID NO: 357 - protein, 14 aa, synthetic construct
GVVAHQPSGQNQQT

SEQ ID NO: 358 - protein, 14 aa, synthetic construct
GSGPILGQLQNQQT

SEQ ID NO: 359 - protein, 14 aa, synthetic construct
GSGHVPNSGLNQQT

SEQ ID NO: 360 - protein, 14 aa, synthetic construct
GDAGVRSSGQNQQT

SEQ ID NO: 361 - protein, 14 aa, synthetic construct
GSGSQLMSLQNQQT

SEQ ID NO: 362 - protein, 14 aa, synthetic construct
GSGLDYSQRQNQQT

SEQ ID NO: 363 - protein, 14 aa, synthetic construct
GSGQSSGRLINKQT

SEQ ID NO: 364 - protein, 14 aa, synthetic construct
GSSVSPSSGQNQQT

SEQ ID NO: 365 - protein, 14 aa, synthetic construct
GSGQVVGLSGNQQT

SEQ ID NO: 366 - protein, 14 aa, synthetic construct
GSNMGVPLGQNQQT

SEQ ID NO: 367 - protein, 14 aa, synthetic construct
GSFYPSSTGQNQQT

SEQ ID NO: 368 - protein, 14 aa, synthetic construct
GSGQNQQTRLTDLT

SEQ ID NO: 369 - protein, 14 aa, synthetic construct
GPTNGRSSGQNQQT

SEQ ID NO: 370 - protein, 14 aa, synthetic construct
GSGLLHGKLQNQQT

SEQ ID NO: 371 - protein, 14 aa, synthetic construct
GANMGHVSGQNQQT

SEQ ID NO: 372 - protein, 14 aa, synthetic construct
GSGQNQQSGRGDLT

SEQ ID NO: 373 - protein, 14 aa, synthetic construct
GSHGHYASGQKQQT

SEQ ID NO: 374 - protein, 14 aa, synthetic construct
GSGDLRISPQNQQT

SEQ ID NO: 375 - protein, 14 aa, synthetic construct
GSGMPVILGQNQQT

SEQ ID NO: 376 - protein, 14 aa, synthetic construct
GRGVITSSGQNHQT

SEQ ID NO: 377 - protein, 14 aa, synthetic construct
GSGHSVSGPQNQQT

SEQ ID NO: 378 - protein, 14 aa, synthetic construct
GSRNGHTVGRNQQT

SEQ ID NO: 379 - protein, 14 aa, synthetic construct
GAGVHMVSGQNQQT

SEQ ID NO: 380 - protein, 14 aa, synthetic construct
GSGQNHRPSVLQQT

SEQ ID NO: 381 - protein, 14 aa, synthetic construct
GSGSPRDSIQNQQT

SEQ ID NO: 382 - protein, 14 aa, synthetic construct
GSGQGIHSSVNQQT

SEQ ID NO: 383 - protein, 14 aa, synthetic construct
GSGQQLSITPNQQT

SEQ ID NO: 384 - protein, 14 aa, synthetic construct
GGYHSQTSGQNQQT

SEQ ID NO: 385 - protein, 14 aa, synthetic construct
GSLHHDNHGQNQQT

SEQ ID NO: 386 - protein, 14 aa, synthetic construct
GIMARDSSGQNQQT

SEQ ID NO: 387 - protein, 14 aa, synthetic construct
GVVHITNSGQNQQT

SEQ ID NO: 388 - protein, 14 aa, synthetic construct
GSGQNQHSAPFNQT

SEQ ID NO: 389 - protein, 14 aa, synthetic construct
GSGQTSGLKQNQQT

SEQ ID NO: 390 - protein, 14 aa, synthetic construct
GSGQNQQTSLSNTA

SEQ ID NO: 391 - protein, 14 aa, synthetic construct
GSGQNQAVHNKSQT

SEQ ID NO: 392 - protein, 14 aa, synthetic construct
GVHTHLPSGQNQQT

SEQ ID NO: 393 - protein, 14 aa, synthetic construct
GHLTMHNSGQNHQT

SEQ ID NO: 394 - protein, 14 aa, synthetic construct
GSGSSSRPYQNQQT

SEQ ID NO: 395 - protein, 14 aa, synthetic construct
GILLATPSGQNQQT

SEQ ID NO: 396 - protein, 14 aa, synthetic construct
GSGQNAGSFPNQQT

SEQ ID NO: 397 - protein, 14 aa, synthetic construct
GSRDGHTVGQNQQT

SEQ ID NO: 398 - protein, 14 aa, synthetic construct
GSLLISTSGQNQQT

SEQ ID NO: 399 - protein, 14 aa, synthetic construct
GSGAMPSHGQNQQT

SEQ ID NO: 400 - protein, 14 aa, synthetic construct
GALVSPISGQNQQT

SEQ ID NO: 401 - protein, 14 aa, synthetic construct
GSLSSHGVGQNQQT

SEQ ID NO: 402 - protein, 14 aa, synthetic construct
GSGQNQQASLAMRT

SEQ ID NO: 403 - protein, 14 aa, synthetic construct
GPGLGSHSGQNQQT

SEQ ID NO: 404 - protein, 14 aa, synthetic construct
GHDSQHKSGQNQQT

SEQ ID NO: 405 - protein, 14 aa, synthetic construct
GSGLTLSATQNQQT

SEQ ID NO: 406 - protein, 14 aa, synthetic construct
GSGQVVAHVGNQQT

SEQ ID NO: 407 - protein, 14 aa, synthetic construct
GSGLRTMTTQNQQT

SEQ ID NO: 408 - protein, 14 aa, synthetic construct
GSGQVGRLLQNQQT

SEQ ID NO: 409 - protein, 14 aa, synthetic construct
GSGQLSHQSVNQQT

SEQ ID NO: 410 - protein, 14 aa, synthetic construct
GSGDRYQTLQNQQT

SEQ ID NO: 411 - protein, 14 aa, synthetic construct
GSGQNQQLKSSAQT

SEQ ID NO: 412 - protein, 14 aa, synthetic construct
GSGQNQYSIPVAQT

SEQ ID NO: 413 - protein, 14 aa, synthetic construct
GSGERLHLTQNQQT

SEQ ID NO: 414 - protein, 14 aa, synthetic construct
GSGHNQQVRTAPNT

SEQ ID NO: 415 - protein, 14 aa, synthetic construct
GGLSHVMSGQNQQT

SEQ ID NO: 416 - protein, 14 aa, synthetic construct
GSGQSHRDVLNQQT

SEQ ID NO: 417 - protein, 14 aa, synthetic construct
GSGQNLAGRMDQQT

SEQ ID NO: 418 - protein, 14 aa, synthetic construct
GSGQNQQTNRGNPM

SEQ ID NO: 419 - protein, 14 aa, synthetic construct
GSGQSYQRDHNQQT

SEQ ID NO: 420 - protein, 14 aa, synthetic construct
GSLLSAGMGQNQHT

SEQ ID NO: 421 - protein, 14 aa, synthetic construct
GSGQNQQTAIYRNI

SEQ ID NO: 422 - protein, 14 aa, synthetic construct
GSGQNQQTSGTTNC

SEQ ID NO: 423 - protein, 14 aa, synthetic construct
GMTSHSVSGQNQQT

SEQ ID NO: 424 - protein, 14 aa, synthetic construct
GSSQSTGYQPNQQT

SEQ ID NO: 425 - protein, 14 aa, synthetic construct
GSLKPTTLGQNQQT

SEQ ID NO: 426 - protein, 14 aa, synthetic construct
GRMFSLGSGQNQQT

SEQ ID NO: 427 - protein, 14 aa, synthetic construct
GSGQNQQTALGVKC

SEQ ID NO: 428 - protein, 14 aa, synthetic construct
GAMVSHSSGQNQQT

SEQ ID NO: 429 - protein, 14 aa, synthetic construct
GSGQNQQRNSDSVT

SEQ ID NO: 430 - protein, 14 aa, synthetic construct
GSGQSMTLHLNQQT

SEQ ID NO: 431 - protein, 14 aa, synthetic construct
GSGQVHQAEVNQQT

SEQ ID NO: 432 - protein, 14 aa, synthetic construct
GSGQNQSQNHLQQT

SEQ ID NO: 433 - protein, 14 aa, synthetic construct
GSLLTTASGQNQQT

SEQ ID NO: 434 - protein, 14 aa, synthetic construct
GSGLIRTAAQNQQT

SEQ ID NO: 435 - protein, 14 aa, synthetic construct
GSGQNQQTVSRQST

SEQ ID NO: 436 - protein, 14 aa, synthetic construct
GSGQYANHGINQQT

SEQ ID NO: 437 - protein, 14 aa, synthetic construct
GSRSTGPSGQNQQT

SEQ ID NO: 438 - protein, 14 aa, synthetic construct
GRGVQQKLQQNQQT

SEQ ID NO: 439 - protein, 14 aa, synthetic construct
GSGQNQQVHLSTGT

SEQ ID NO: 440 - protein, 14 aa, synthetic construct
GSGQNQQLSAKSST

SEQ ID NO: 441 - protein, 14 aa, synthetic construct
GSGYKAARPQNQQT

SEQ ID NO: 442 - protein, 14 aa, synthetic construct
GSAGISPSGQNQQT

SEQ ID NO: 443 - protein, 14 aa, synthetic construct
GSGQNRAHAFLQQT

SEQ ID NO: 444 - protein, 14 aa, synthetic construct
GSGLSGITMQNQQT

SEQ ID NO: 445 - protein, 14 aa, synthetic construct
GPGSAHSSGQNQQT

SEQ ID NO: 446 - protein, 14 aa, synthetic construct
GSSHTQALGQNQQT

SEQ ID NO: 447 - protein, 14 aa, synthetic construct
GSGVHGVSSQNQQT

SEQ ID NO: 448 - protein, 14 aa, synthetic construct
GSSGRDMGGQNQQT

SEQ ID NO: 449 - protein, 14 aa, synthetic construct
GERAFPTSGQNQQT

SEQ ID NO: 450 - protein, 14 aa, synthetic construct
GGRIVSLSGQNQQT

SEQ ID NO: 451 - protein, 14 aa, synthetic construct
GSGQNSYSHTSQQT

SEQ ID NO: 452 - protein, 14 aa, synthetic construct
GLGYPGSSGQNQQT

SEQ ID NO: 453 - protein, 14 aa, synthetic construct
GSGPQSHTGQNQQT

SEQ ID NO: 454 - protein, 14 aa, synthetic construct
GSGQNQQLSRDAST

SEQ ID NO: 455 - protein, 14 aa, synthetic construct
GSGQILHSVPNQQT

SEQ ID NO: 456 - protein, 14 aa, synthetic construct
GSGFHTDSRQNQQT

SEQ ID NO: 457 - protein, 14 aa, synthetic construct
GSGQSHSLATNQQT

SEQ ID NO: 458 - protein, 14 aa, synthetic construct
GSGQNQQTLSKPWT

SEQ ID NO: 459 - protein, 14 aa, synthetic construct
GSGHAAISQQNQQT

SEQ ID NO: 460 - protein, 14 aa, synthetic construct
GSGQNQQQIGGNST

SEQ ID NO: 461 - protein, 14 aa, synthetic construct
GGGPMAGSGQNQQT

SEQ ID NO: 462 - protein, 14 aa, synthetic construct
GMRMEYQSGQNQQT

SEQ ID NO: 463 - protein, 14 aa, synthetic construct
GSGQNQQGTLLHQT

SEQ ID NO: 464 - protein, 14 aa, synthetic construct
GSGQNQRSSGGVQT

SEQ ID NO: 465 - protein, 14 aa, synthetic construct
GSGQNQRGALATQT

SEQ ID NO: 466 - protein, 14 aa, synthetic construct
GSGTVHAATQNQQT

SEQ ID NO: 467 - protein, 14 aa, synthetic construct
GSRMTQQFGQNQQT

SEQ ID NO: 468 - protein, 14 aa, synthetic construct
GSSSPGASGQNQQT

SEQ ID NO: 469 - protein, 14 aa, synthetic construct
GHPSPHVSGQNQQT

SEQ ID NO: 470 - protein, 14 aa, synthetic construct
GSGSHHASRQNQQT

SEQ ID NO: 471 - protein, 14 aa, synthetic construct
GAVGHSYSGQNQQT

SEQ ID NO: 472 - protein, 14 aa, synthetic construct
GSRSQYDIGQNQQT

SEQ ID NO: 473 - protein, 14 aa, synthetic construct
GSGQGPQERGNQQT

SEQ ID NO: 474 - protein, 14 aa, synthetic construct
GSIAHVGTGQNQQT

SEQ ID NO: 475 - protein, 14 aa, synthetic construct
GSGQNQQKQNHGNT

SEQ ID NO: 476 - protein, 14 aa, synthetic construct
GSGQNQQALGSQRT

SEQ ID NO: 477 - protein, 14 aa, synthetic construct
GSGAITHMPQNQQT

SEQ ID NO: 478 - protein, 14 aa, synthetic construct
GSGQRNPLLLNQQT

SEQ ID NO: 479 - protein, 14 aa, synthetic construct
GSSGIPVSHQNQQT

SEQ ID NO: 480 - protein, 14 aa, synthetic construct
GVHSLTPSGQNQQT

SEQ ID NO: 481 - protein, 14 aa, synthetic construct
GVIVLHGSGQNQQT

SEQ ID NO: 482 - protein, 14 aa, synthetic construct
GGTRVVDSGQNQQT

SEQ ID NO: 483 - protein, 14 aa, synthetic construct
GSGGVTYQSQNQQT

SEQ ID NO: 484 - protein, 14 aa, synthetic construct
GSGQNQAGHGPGQT

SEQ ID NO: 485 - protein, 14 aa, synthetic construct
GSGQLVTSGPNQQT

SEQ ID NO: 486 - protein, 14 aa, synthetic construct
GSGIAAQRTQNQQT

SEQ ID NO: 487 - protein, 14 aa, synthetic construct
GSTPAGVGGQNQQT

SEQ ID NO: 488 - protein, 14 aa, synthetic construct
GSGQNQQTSTGVHS

SEQ ID NO: 489 - protein, 14 aa, synthetic construct
GSGQIRQLVDNQQT

SEQ ID NO: 490 - protein, 14 aa, synthetic construct
GSLIGMQSGQNQQT

SEQ ID NO: 491 - protein, 14 aa, synthetic construct
GSGQIKGKMDNQQT

SEQ ID NO: 492 - protein, 14 aa, synthetic construct
GSGSDMSSWQNQQT

SEQ ID NO: 493 - protein, 14 aa, synthetic construct
GRGQNQQHTGLATT

SEQ ID NO: 494 - protein, 14 aa, synthetic construct
GSGQNQQTLYSSNT

SEQ ID NO: 495 - protein, 14 aa, synthetic construct
GSGQTQVLKSNQQT

SEQ ID NO: 496 - protein, 14 aa, synthetic construct
GSRTLSNVGQNQQT

SEQ ID NO: 497 - protein, 14 aa, synthetic construct
GSGVQHSLPQNQQT

SEQ ID NO: 498 - protein, 14 aa, synthetic construct
GNYLHQASGQNQQT

SEQ ID NO: 499 - protein, 14 aa, synthetic construct
GSGGTSVHQQNQQT

SEQ ID NO: 500 - protein, 14 aa, synthetic construct
GMDHSRPSGQNQQT

SEQ ID NO: 501 - protein, 14 aa, synthetic construct
GSGQNQQSMGTFTT

SEQ ID NO: 502 - protein, 14 aa, synthetic construct
GSGQNQQTPLRPPT

SEQ ID NO: 503 - protein, 14 aa, synthetic construct
GSGQNQHHSVSQQT

SEQ ID NO: 504 - protein, 14 aa, synthetic construct
GSGQLRSLSTNQQT

SEQ ID NO: 505 - protein, 14 aa, synthetic construct
GSGSPRQLSQNQQT

SEQ ID NO: 506 - protein, 14 aa, synthetic construct
GSGQNQQTTASSHT

SEQ ID NO: 507 - protein, 14 aa, synthetic construct
GRGQVVSTHQNQQT

SEQ ID NO: 508 - protein, 14 aa, synthetic construct
GSAQVSMVGQNQQT

SEQ ID NO: 509 - protein, 14 aa, synthetic construct
GSSTLVTIGKNQQT

SEQ ID NO: 510 - protein, 14 aa, synthetic construct
GFAHQASSGQNQQT

SEQ ID NO: 511 - protein, 14 aa, synthetic construct
GSGQPVLSISNQQT

SEQ ID NO: 512 - protein, 14 aa, synthetic construct
GSGQSHRSELNQQT

SEQ ID NO: 513 - protein, 14 aa, synthetic construct
GSSVGSPIGQNQQT

SEQ ID NO: 514 - protein, 14 aa, synthetic construct
GSGMPIRNVQNQQT

SEQ ID NO: 515 - protein, 14 aa, synthetic construct
GSSTRVDSGQNQQT

SEQ ID NO: 516 - protein, 14 aa, synthetic construct
GSGQNQQTAMRSTT

SEQ ID NO: 517 - protein, 14 aa, synthetic construct
GSGQNQQHSSSHLT

SEQ ID NO: 518 - protein, 14 aa, synthetic construct
GSRNGHAVGQNQQT

SEQ ID NO: 519 - protein, 14 aa, synthetic construct
GLGAYQSSGQNQQT

SEQ ID NO: 520 - protein, 14 aa, synthetic construct
GPGLSGHSGQNQQT

SEQ ID NO: 521 - protein, 14 aa, synthetic construct
GSTGIVSSGQNQQT

SEQ ID NO: 522 - protein, 14 aa, synthetic construct
GSRTTQVIGQNQQT

SEQ ID NO: 523 - protein, 14 aa, synthetic construct
GSGLLHRAQQNQQT

SEQ ID NO: 524 - protein, 14 aa, synthetic construct
GSGQNAQQAAAQQT

SEQ ID NO: 525 - protein, 14 aa, synthetic construct
GSGQNQQSALRTQT

SEQ ID NO: 526 - protein, 14 aa, synthetic construct
GSGFLSDTRQNQQT

SEQ ID NO: 527 - protein, 14 aa, synthetic construct
GSGLLYHDQQNQQT

SEQ ID NO: 528 - protein, 14 aa, synthetic construct
GSGQNQHYSLHKQT

SEQ ID NO: 529 - protein, 14 aa, synthetic construct
GSGHSPLPQQNQQT

SEQ ID NO: 530 - protein, 14 aa, synthetic construct
GNGHSMRPNQNQQT

SEQ ID NO: 531 - protein, 14 aa, synthetic construct
GSGLKWSTLQNQQT

SEQ ID NO: 532 - protein, 14 aa, synthetic construct
GSGQMGRQAVNQQT

SEQ ID NO: 533 - protein, 14 aa, synthetic construct
GSGQNQQTSGVLTL

SEQ ID NO: 534 - protein, 14 aa, synthetic construct
GSGQNQQALHNPHT

SEQ ID NO: 535 - protein, 14 aa, synthetic construct
GSGQNQQVIPNSKT

SEQ ID NO: 536 - protein, 14 aa, synthetic construct
GSPLQDRVGQNQQT

SEQ ID NO: 537 - protein, 14 aa, synthetic construct
GSGQNQYSSTNPQT

SEQ ID NO: 538 - protein, 14 aa, synthetic construct
GAMTVTISGQNQQT

SEQ ID NO: 539 - protein, 14 aa, synthetic construct
GSGQNQQLQTLIRT

SEQ ID NO: 540 - protein, 14 aa, synthetic construct
GSGLRQTSQQNQQT

SEQ ID NO: 541 - protein, 14 aa, synthetic construct
GSGQNQQTGLRQQT

SEQ ID NO: 542 - protein, 14 aa, synthetic construct
GSGQTRQMKDNQQT

SEQ ID NO: 543 - protein, 14 aa, synthetic construct
GSGQNHGLQSGQQT

SEQ ID NO: 544 - protein, 14 aa, synthetic construct
GSGQSHRQPENQQT

SEQ ID NO: 545 - protein, 14 aa, synthetic construct
GSGQDRHIVQNQQT

SEQ ID NO: 546 - protein, 14 aa, synthetic construct
GSGQNQQLPHSNLT

SEQ ID NO: 547 - protein, 14 aa, synthetic construct
GSGQLSVPYDNQQT

SEQ ID NO: 548 - protein, 14 aa, synthetic construct
GSGRNPQTQPLQQT

SEQ ID NO: 549 - protein, 14 aa, synthetic construct
GSGQPYSTGLNQQT

SEQ ID NO: 550 - protein, 14 aa, synthetic construct
GSGQNQQTHGGLRD

SEQ ID NO: 551 - protein, 14 aa, synthetic construct
GAYGMVSSGQNQQT

SEQ ID NO: 552 - protein, 14 aa, synthetic construct
GSGIQSSYSQNQQT

SEQ ID NO: 553 - protein, 14 aa, synthetic construct
GPRLSDQSGQNQQT

SEQ ID NO: 554 - protein, 14 aa, synthetic construct
GSGQNQQTHPSPCT

SEQ ID NO: 555 - protein, 14 aa, synthetic construct
GSGQSFQMHTNQQT

SEQ ID NO: 556 - protein, 14 aa, synthetic construct
GSGQNQQTGNPKHT

SEQ ID NO: 557 - protein, 14 aa, synthetic construct
GFSSAVHSGQNQQT

SEQ ID NO: 558 - protein, 14 aa, synthetic construct
GSGQNQQTSMSNAT

SEQ ID NO: 559 - protein, 14 aa, synthetic construct
GSGQDMKQHHNQQT

SEQ ID NO: 560 - protein, 14 aa, synthetic construct
GLRLSTPSGQNQQT

SEQ ID NO: 561 - protein, 14 aa, synthetic construct
GSGQNQQTSVYMNT

SEQ ID NO: 562 - protein, 14 aa, synthetic construct
GSGQNQYSQSSMQT

SEQ ID NO: 563 - protein, 14 aa, synthetic construct
GSGQNQQSMADHTT

SEQ ID NO: 564 - protein, 14 aa, synthetic construct
GWERSFVSGQNQQT

SEQ ID NO: 565 - protein, 14 aa, synthetic construct
GLLAGKSSGQNQQT

SEQ ID NO: 566 - protein, 14 aa, synthetic construct
GKSFVPQSGQNQQT

SEQ ID NO: 567 - protein, 14 aa, synthetic construct
GSGQMQSAGSNQQT

SEQ ID NO: 568 - protein, 14 aa, synthetic construct
GSDQNQRLTSSMQT

SEQ ID NO: 569 - protein, 14 aa, synthetic construct
GESRAVLSGQNQQT

SEQ ID NO: 570 - protein, 14 aa, synthetic construct
GSVFGVPSGQNQQT

SEQ ID NO: 571 - protein, 14 aa, synthetic construct
GSGLPDRNLQNQQT

SEQ ID NO: 572 - protein, 14 aa, synthetic construct
GSGTHNSAIQNQQT

SEQ ID NO: 573 - protein, 14 aa, synthetic construct
GSGMIIASMQNQQT

SEQ ID NO: 574 - protein, 14 aa, synthetic construct
GGITWTDSGQNQQT

SEQ ID NO: 575 - protein, 14 aa, synthetic construct
GSGQNQQASGRQQT

SEQ ID NO: 576 - protein, 14 aa, synthetic construct
GSGQNQQPHLKSLT

SEQ ID NO: 577 - protein, 14 aa, synthetic construct
GPPQHMTSGQNQQT

SEQ ID NO: 578 - protein, 14 aa, synthetic construct
GSGQNQQASLPSRT

SEQ ID NO: 579 - protein, 14 aa, synthetic construct
GSGQIVSTQTNQQT

SEQ ID NO: 580 - protein, 14 aa, synthetic construct
GSGKGHSAGQNQQT

SEQ ID NO: 581 - protein, 14 aa, synthetic construct
GSGQNTRLQLGQQT

SEQ ID NO: 582 - protein, 14 aa, synthetic construct
GSVGSRPVGQNQQT

SEQ ID NO: 583 - protein, 14 aa, synthetic construct
GSSHTLALGQNQQT

SEQ ID NO: 584 - protein, 14 aa, synthetic construct
GMYEYSQSGQNQQT

SEQ ID NO: 585 - protein, 14 aa, synthetic construct
GNGQNQQHSILHGT

SEQ ID NO: 586 - protein, 14 aa, synthetic construct
GSGYNQPHLQNQQT

SEQ ID NO: 587 - protein, 14 aa, synthetic construct
GPLVNASSGQNQQT

SEQ ID NO: 588 - protein, 14 aa, synthetic construct
GSGQNQQVLTTART

SEQ ID NO: 589 - protein, 14 aa, synthetic construct
GSGQNQHSVHNDQT

SEQ ID NO: 590 - protein, 14 aa, synthetic construct
GAGLIMHSGQNQQT

SEQ ID NO: 591 - protein, 14 aa, synthetic construct
GMGRHSASGQNQQT

SEQ ID NO: 592 - protein, 14 aa, synthetic construct
GSHSQSGHGQNQQT

SEQ ID NO: 593 - protein, 14 aa, synthetic construct
GSSTTIVSGQNHQT

SEQ ID NO: 594 - protein, 14 aa, synthetic construct
GRHLVTASGQNQQT

SEQ ID NO: 595 - protein, 14 aa, synthetic construct
GSGQNQQHANLNQT

SEQ ID NO: 596 - protein, 14 aa, synthetic construct
GSGSTHSKAQNQQT

SEQ ID NO: 597 - protein, 14 aa, synthetic construct
GSGQNKQMLSGNTT

SEQ ID NO: 598 - protein, 14 aa, synthetic construct
GSGQVHNPTQNQQT

SEQ ID NO: 599 - protein, 14 aa, synthetic construct
GSGQNQQIPHVHQT

SEQ ID NO: 600 - protein, 14 aa, synthetic construct
GSLHAGLSGQNQQT

SEQ ID NO: 601 - protein, 14 aa, synthetic construct
GPAQHGTSGQNQQT

SEQ ID NO: 602 - protein, 14 aa, synthetic construct
GEKAVTSSGQNQQT

SEQ ID NO: 603 - protein, 14 aa, synthetic construct
GSGQNQQTMANGQR

SEQ ID NO: 604 - protein, 14 aa, synthetic construct
GSGSPHSKDQNQQT

SEQ ID NO: 605 - protein, 14 aa, synthetic construct
GSFSMGYGGQNQQT

SEQ ID NO: 606 - protein, 14 aa, synthetic construct
GSGTHLVSLQNQQT

SEQ ID NO: 607 - protein, 14 aa, synthetic construct
GSGQMQPHVQNQQT

SEQ ID NO: 608 - protein, 14 aa, synthetic construct
GSGQNQQVAGLNNT

SEQ ID NO: 609 - protein, 14 aa, synthetic construct
GSSQNQQHDMRLRT

SEQ ID NO: 610 - protein, 14 aa, synthetic construct
GPASLPISGQNQQT

SEQ ID NO: 611 - protein, 14 aa, synthetic construct
GSGQNQQPPLATRT

SEQ ID NO: 612 - protein, 14 aa, synthetic construct
GSSRVPVSGQNQQT

SEQ ID NO: 613 - protein, 14 aa, synthetic construct
GSGQNQQTNLGHTT

SEQ ID NO: 614 - protein, 14 aa, synthetic construct
GSGQNQQLVSRVQT

SEQ ID NO: 615 - protein, 14 aa, synthetic construct
GPNSYPVSGQKQQT

SEQ ID NO: 616 - protein, 14 aa, synthetic construct
GHAHYQASGQNQQT

SEQ ID NO: 617 - protein, 14 aa, synthetic construct
GSGQALLSTGNQQT

SEQ ID NO: 618 - protein, 14 aa, synthetic construct
GSGQLPRQMTNQQT

SEQ ID NO: 619 - protein, 14 aa, synthetic construct
GSGFPKSTEQNQQT

SEQ ID NO: 620 - protein, 14 aa, synthetic construct
GSRETSLSGQNQQT

SEQ ID NO: 621 - protein, 14 aa, synthetic construct
GSGQNQQGTGVSHT

SEQ ID NO: 622 - protein, 14 aa, synthetic construct
GSRTVPVYGQNQQT

SEQ ID NO: 623 - protein, 14 aa, synthetic construct
GSNAQSAHGQNQQT

SEQ ID NO: 624 - protein, 14 aa, synthetic construct
GAFHLAASGQNQQT

SEQ ID NO: 625 - protein, 14 aa, synthetic construct
GSGQYRSSSDNQQT

SEQ ID NO: 626 - protein, 14 aa, synthetic construct
GSGQVYISTPNQQT

SEQ ID NO: 627 - protein, 14 aa, synthetic construct
GSGVSTQLLQNQQT

SEQ ID NO: 628 - protein, 14 aa, synthetic construct
GSGQLGLSVTNQQT

SEQ ID NO: 629 - protein, 14 aa, synthetic construct
GSGSNMRLSQNQQT

SEQ ID NO: 630 - protein, 14 aa, synthetic construct
GSGQNLHSGLPQQT

SEQ ID NO: 631 - protein, 14 aa, synthetic construct
GSSHTLALGQNKQT

SEQ ID NO: 632 - protein, 14 aa, synthetic construct
GSGQNQHSLPAHRT

SEQ ID NO: 633 - protein, 14 aa, synthetic construct
GSGQNQGTVYPNQT

SEQ ID NO: 634 - protein, 14 aa, synthetic construct
GSGQNQQPSLRQST

SEQ ID NO: 635 - protein, 14 aa, synthetic construct
GSGQNARLKDNQQT

SEQ ID NO: 636 - protein, 14 aa, synthetic construct
GHAGSTGSGQNQQT

SEQ ID NO: 637 - protein, 14 aa, synthetic construct
GSGQALSSSGNQQT

SEQ ID NO: 638 - protein, 14 aa, synthetic construct
GSGASESHRQNQQT

SEQ ID NO: 639 - protein, 14 aa, synthetic construct
GVGVITSSGQNQQT

SEQ ID NO: 640 - protein, 14 aa, synthetic construct
GSLYGQSLGQNQQT

SEQ ID NO: 641 - protein, 14 aa, synthetic construct
GSGQMSDVHGNQQT

SEQ ID NO: 642 - protein, 14 aa, synthetic construct
GSGQNQQHSSKATT

SEQ ID NO: 643 - protein, 14 aa, synthetic construct
GSGQNQQTSVSQQT

SEQ ID NO: 644 - protein, 14 aa, synthetic construct
GSGQKMWKLDNQQT

SEQ ID NO: 645 - protein, 14 aa, synthetic construct
GSGQNVSMQVNQQT

SEQ ID NO: 646 - protein, 14 aa, synthetic construct
GSGQNQRATLSNQT

SEQ ID NO: 647 - protein, 14 aa, synthetic construct
GSGQASSKSANQQT

SEQ ID NO: 648 - protein, 14 aa, synthetic construct
GSGKNQTPIPKGQT

SEQ ID NO: 649 - protein, 14 aa, synthetic construct
GSGQNQQTRQEGST

SEQ ID NO: 650 - protein, 14 aa, synthetic construct
GASSLATSGQNQQT

SEQ ID NO: 651 - protein, 14 aa, synthetic construct
GSGQRGSLTENQQT

SEQ ID NO: 652 - protein, 14 aa, synthetic construct
GSEQTRQRGQNQQT

SEQ ID NO: 653 - protein, 14 aa, synthetic construct
GSGQNQQTLTASKE

SEQ ID NO: 654 - protein, 14 aa, synthetic construct
GSGTSGKTGKNQQT

SEQ ID NO: 655 - protein, 14 aa, synthetic construct
GQLVTFTSGQNQQT

SEQ ID NO: 656 - protein, 14 aa, synthetic construct
GSGQNQQSANKILT

SEQ ID NO: 657 - protein, 14 aa, synthetic construct
GSGQNQQHHSSHTT

SEQ ID NO: 658 - protein, 14 aa, synthetic construct
GSGQNQKGMQPNQT

SEQ ID NO: 659 - protein, 14 aa, synthetic construct
GSGQLVSGLYNQQT

SEQ ID NO: 660 - protein, 14 aa, synthetic construct
GSSVGVPSGQNQQT

SEQ ID NO: 661 - protein, 14 aa, synthetic construct
GSGQNQQWDSRRQT

SEQ ID NO: 662 - protein, 14 aa, synthetic construct
GSEQTRQSGQNQQT

SEQ ID NO: 663 - protein, 14 aa, synthetic construct
GSGIGSHIPQNQQT

SEQ ID NO: 664 - protein, 14 aa, synthetic construct
GSGQNQRLHGVDQT

SEQ ID NO: 665 - protein, 14 aa, synthetic construct
GEVSRVLSGQNQQT

SEQ ID NO: 666 - protein, 14 aa, synthetic construct
GSGQNQQKVSPLLT

SEQ ID NO: 667 - protein, 14 aa, synthetic construct
GSGLALERSQNQQT

SEQ ID NO: 668 - protein, 14 aa, synthetic construct
GPDRIGSSGQNQQT

SEQ ID NO: 669 - protein, 14 aa, synthetic construct
GSGQNQDHQNKQQT

SEQ ID NO: 670 - protein, 14 aa, synthetic construct
GSGQNQQTALYNNT

SEQ ID NO: 671 - protein, 14 aa, synthetic construct
GSGAVHLTAQNQQT

SEQ ID NO: 672 - protein, 14 aa, synthetic construct
GSLVSTQSGQNQQT

SEQ ID NO: 673 - protein, 14 aa, synthetic construct
GSGVSARMVQNQQT

SEQ ID NO: 674 - protein, 14 aa, synthetic construct
GSGQTRMPLANQQT

SEQ ID NO: 675 - protein, 14 aa, synthetic construct
GSGISSRNMQNQQT

SEQ ID NO: 676 - protein, 14 aa, synthetic construct
GSGEKVHSGQNQQT

SEQ ID NO: 677 - protein, 14 aa, synthetic construct
GSGQNQQKLSSMST

SEQ ID NO: 678 - protein, 14 aa, synthetic construct
GSGQNQQTGQHMRV

SEQ ID NO: 679 - protein, 14 aa, synthetic construct
GSGMIHTTAQNQQT

SEQ ID NO: 680 - protein, 14 aa, synthetic construct
GSGQNWPALKGQQT

SEQ ID NO: 681 - protein, 14 aa, synthetic construct
GASHMSISGQNQQT

SEQ ID NO: 682 - protein, 14 aa, synthetic construct
GSDQNQQLGYSKQT

SEQ ID NO: 683 - protein, 14 aa, synthetic construct
GIPSIRESGQNQQT

SEQ ID NO: 684 - protein, 14 aa, synthetic construct
GSGIPSVKFQNQQT

SEQ ID NO: 685 - protein, 14 aa, synthetic construct
GSGQNQQTSVSQNV

SEQ ID NO: 686 - protein, 14 aa, synthetic construct
GSGQNQQIGESRMT

SEQ ID NO: 687 - protein, 14 aa, synthetic construct
GSGSSSMSFQNQQT

SEQ ID NO: 688 - protein, 14 aa, synthetic construct
GSGQKQERAVSKQT

SEQ ID NO: 689 - protein, 14 aa, synthetic construct
GCTTRLNSGQNQQT

SEQ ID NO: 690 - protein, 14 aa, synthetic construct
GSGQNQQIISTKIT

SEQ ID NO: 691 - protein, 14 aa, synthetic construct
GSGQNQQKSLNGNT

SEQ ID NO: 692 - protein, 14 aa, synthetic construct
GSGIPAPRLQNQQT

SEQ ID NO: 693 - protein, 14 aa, synthetic construct
GSGQIRESMGNQQT

SEQ ID NO: 694 - protein, 14 aa, synthetic construct
GSGQNSGVHFNQQT

SEQ ID NO: 695 - protein, 14 aa, synthetic construct
GSGQNIGHSLPQQT

SEQ ID NO: 696 - protein, 14 aa, synthetic construct
GSGERSISVQNQQT

SEQ ID NO: 697 - protein, 14 aa, synthetic construct
GSGLKPNVLQNQQT

SEQ ID NO: 698 - protein, 14 aa, synthetic construct
GSGQVAYAQGNQQT

SEQ ID NO: 699 - protein, 14 aa, synthetic construct
GSGQSSYGSGNQQT

SEQ ID NO: 700 - protein, 14 aa, synthetic construct
GSGQNQAMTHGDQT

SEQ ID NO: 701 - protein, 14 aa, synthetic construct
GSGQNQALVSMGQT

SEQ ID NO: 702 - protein, 14 aa, synthetic construct
GSGQNPSFMRGQQT

SEQ ID NO: 703 - protein, 14 aa, synthetic construct
GSGQNQQSHLRTNT

SEQ ID NO: 704 - protein, 14 aa, synthetic construct
GYTRLETSGQNQQT

SEQ ID NO: 705 - protein, 14 aa, synthetic construct
GSGQSYDMRGNQQT

SEQ ID NO: 706 - protein, 14 aa, synthetic construct
GSRTTQDIGQNQQT

SEQ ID NO: 707 - protein, 14 aa, synthetic construct
GSGHPYKAAQNQQT

SEQ ID NO: 708 - protein, 14 aa, synthetic construct
GRLSNAHGGQNQQT

SEQ ID NO: 709 - protein, 14 aa, synthetic construct
GSGQNQRAVLNDQT

SEQ ID NO: 710 - protein, 14 aa, synthetic construct
GGSHTYGGGQNQQT

SEQ ID NO: 711 - protein, 14 aa, synthetic construct
GSSVNSMIGQNQQT

SEQ ID NO: 712 - protein, 14 aa, synthetic construct
GNSSMMGSGQNQQT

SEQ ID NO: 713 - protein, 14 aa, synthetic construct
GNRDRPSSGQNQQT

SEQ ID NO: 714 - protein, 14 aa, synthetic construct
GSGNMHASRQNQQT

SEQ ID NO: 715 - protein, 14 aa, synthetic construct
GFIFPKVSGQNQQT

SEQ ID NO: 716 - protein, 14 aa, synthetic construct
GSGQNQQLKNSTST

SEQ ID NO: 717 - protein, 14 aa, synthetic construct
GSGQNQQSQYMPRT

SEQ ID NO: 718 - protein, 14 aa, synthetic construct
GSGQRMADIGNQQT

SEQ ID NO: 719 - protein, 14 aa, synthetic construct
GSGQNQSHYPSQQT

SEQ ID NO: 720 - protein, 14 aa, synthetic construct
GSDGKMHRGQNQQT

SEQ ID NO: 721 - protein, 14 aa, synthetic construct
GSGSVGFIGQNQQT

SEQ ID NO: 722 - protein, 14 aa, synthetic construct
GLHGMTLSGQNQQT

SEQ ID NO: 723 - protein, 14 aa, synthetic construct
GSDQSKRGDSNQQT

SEQ ID NO: 724 - protein, 14 aa, synthetic construct
GSLFLATGGQNQQT

SEQ ID NO: 725 - protein, 14 aa, synthetic construct
GSGQNQQPSAFSKT

SEQ ID NO: 726 - protein, 14 aa, synthetic construct
GSGQLPQSGLNQQT

SEQ ID NO: 727 - protein, 14 aa, synthetic construct
GSGSKQNALQNQQT

SEQ ID NO: 728 - protein, 14 aa, synthetic construct
GSGQRRELSQNQQT

SEQ ID NO: 729 - protein, 14 aa, synthetic construct
GSGQREPKASNQQT

SEQ ID NO: 730 - protein, 14 aa, synthetic construct
GSGQNQQHPSTQQT

SEQ ID NO: 731 - protein, 14 aa, synthetic construct
GSQSTLGLGQNQQT

SEQ ID NO: 732 - protein, 14 aa, synthetic construct
GSGQNQQMPGLSST

SEQ ID NO: 733 - protein, 14 aa, synthetic construct
GSGQNQQTVGGKNL

SEQ ID NO: 734 - protein, 14 aa, synthetic construct
GSSREFHSGQNQQT

SEQ ID NO: 735 - protein, 14 aa, synthetic construct
GSGQNQQTVPSNLV

SEQ ID NO: 736 - protein, 14 aa, synthetic construct
GSGQNAYSSQAQQT

SEQ ID NO: 737 - protein, 14 aa, synthetic construct
GSGQNKDHSTRRQT

SEQ ID NO: 738 - protein, 14 aa, synthetic construct
GQLGSVGSGQDQQT

SEQ ID NO: 739 - protein, 14 aa, synthetic construct
GSGQHAAPGHNQQT

SEQ ID NO: 740 - protein, 14 aa, synthetic construct
GSGQNQQTSQSPPT

SEQ ID NO: 741 - protein, 14 aa, synthetic construct
GSGNYRDHEQNQQT

SEQ ID NO: 742 - protein, 14 aa, synthetic construct
GSGQHSNQHVNQQT

SEQ ID NO: 743 - protein, 14 aa, synthetic construct
GSGQTARNGINQQT

SEQ ID NO: 744 - protein, 14 aa, synthetic construct
GSGQNQQHYGSQGT

SEQ ID NO: 745 - protein, 14 aa, synthetic construct
GSGSPQASRQNQQT

SEQ ID NO: 746 - protein, 14 aa, synthetic construct
GSGFSHSMGKNQQT

SEQ ID NO: 747 - protein, 14 aa, synthetic construct
GSGQSHSLETNQQT

SEQ ID NO: 748 - protein, 14 aa, synthetic construct
GTEQTRQSGQNQQT

SEQ ID NO: 749 - protein, 14 aa, synthetic construct
GSGRHLASVQNQQT

SEQ ID NO: 750 - protein, 14 aa, synthetic construct
GLGSKNHSGQNQQT

SEQ ID NO: 751 - protein, 14 aa, synthetic construct
GSGQNQQTSHFPSA

SEQ ID NO: 752 - protein, 14 aa, synthetic construct
GSGQLSGTPQNQQT

SEQ ID NO: 753 - protein, 14 aa, synthetic construct
GSGQNQQAPHKKET

SEQ ID NO: 754 - protein, 14 aa, synthetic construct
GSGQNQQTLRGSLE

SEQ ID NO: 755 - protein, 14 aa, synthetic construct
GSIAMTSHGQNQQT

SEQ ID NO: 756 - protein, 14 aa, synthetic construct
GSPGVSPSGQNQQT

SEQ ID NO: 757 - protein, 14 aa, synthetic construct
GSGQNQQTGSSSRV

SEQ ID NO: 758 - protein, 14 aa, synthetic construct
GSGQHLPLLGNQQT

SEQ ID NO: 759 - protein, 14 aa, synthetic construct
GSDHSHRGGQNQQT

SEQ ID NO: 760 - protein, 14 aa, synthetic construct
GSGIVTKLGQNQQT

SEQ ID NO: 761 - protein, 14 aa, synthetic construct
GSGQDVTKTGNQQT

SEQ ID NO: 762 - protein, 14 aa, synthetic construct
GSGQNQQSHGRIGT

SEQ ID NO: 763 - protein, 14 aa, synthetic construct
GSGQNQQINHRSPT

SEQ ID NO: 764 - protein, 14 aa, synthetic construct
GSGDDSRVGQNQQT

SEQ ID NO: 765 - protein, 14 aa, synthetic construct
GSGQSTLKRINQQT

SEQ ID NO: 766 - protein, 14 aa, synthetic construct
GSGSQHSKAQNQQT

SEQ ID NO: 767 - protein, 14 aa, synthetic construct
GSGQNQQHASSNNT

SEQ ID NO: 768 - protein, 14 aa, synthetic construct
GSRTYQVSGQNQQT

SEQ ID NO: 769 - protein, 14 aa, synthetic construct
GSGQNQGLLSSPQT

SEQ ID NO: 770 - protein, 14 aa, synthetic construct
GSGGGLQHNQNQQT

SEQ ID NO: 771 - protein, 14 aa, synthetic construct
GSGQNQQTTAATRM

SEQ ID NO: 772 - protein, 14 aa, synthetic construct
GSGQNQRASILVQT

SEQ ID NO: 773 - protein, 14 aa, synthetic construct
GSGQNLGLLGAQQT

SEQ ID NO: 774 - protein, 14 aa, synthetic construct
GSLDLGRSGQNQQT

SEQ ID NO: 775 - protein, 14 aa, synthetic construct
GNSQVKVSGQNQQT

SEQ ID NO: 776 - protein, 14 aa, synthetic construct
GSSGSHQYGQNQQT

SEQ ID NO: 777 - protein, 14 aa, synthetic construct
GSGQNQQQRDGTLT

SEQ ID NO: 778 - protein, 14 aa, synthetic construct
GRGQHVSVANNQQT

SEQ ID NO: 779 - protein, 14 aa, synthetic construct
GDSSSRISGQNQQT

SEQ ID NO: 780 - protein, 14 aa, synthetic construct
GSGQNQQHSLSSQT

SEQ ID NO: 781 - protein, 14 aa, synthetic construct
GSLMDVHRGQNQQT

SEQ ID NO: 782 - protein, 14 aa, synthetic construct
GSIQYQSSGQNQQT

SEQ ID NO: 783 - protein, 14 aa, synthetic construct
GLGSKNPSGQNQQT

SEQ ID NO: 784 - protein, 14 aa, synthetic construct
GSGQLVLTLQNQQT

SEQ ID NO: 785 - protein, 14 aa, synthetic construct
GSGQNQQTSQPLPG

SEQ ID NO: 786 - protein, 14 aa, synthetic construct
GSGQNQQNLGKLNT

SEQ ID NO: 787 - protein, 14 aa, synthetic construct
GTTAHQPSGQNQQT

SEQ ID NO: 788 - protein, 14 aa, synthetic construct
GSGQNRAQIGTQQT

SEQ ID NO: 789 - protein, 14 aa, synthetic construct
GSGQYVHVSSNQQT

SEQ ID NO: 790 - protein, 14 aa, synthetic construct
GSGQNQQTAHAFNI

SEQ ID NO: 791 - protein, 14 aa, synthetic construct
GSGQNQRTMVATQT

SEQ ID NO: 792 - protein, 14 aa, synthetic construct
GSGQNPIRGAMQQT

SEQ ID NO: 793 - protein, 14 aa, synthetic construct
GSGYVITGSQNQQT

SEQ ID NO: 794 - protein, 14 aa, synthetic construct
GRGPKQSNIQNQQT

SEQ ID NO: 795 - protein, 14 aa, synthetic construct
GSGQNQQTMLGKPC

SEQ ID NO: 796 - protein, 14 aa, synthetic construct
GSGQNQQVGSTVRT

SEQ ID NO: 797 - protein, 14 aa, synthetic construct
GNVTTQKSGQNQQT

SEQ ID NO: 798 - protein, 14 aa, synthetic construct
GSGNPVSHLQNQQT

SEQ ID NO: 799 - protein, 14 aa, synthetic construct
GSLSHMESGQNQQT

SEQ ID NO: 800 - protein, 14 aa, synthetic construct
GRAPTNLSGQNQQT

SEQ ID NO: 801 - protein, 14 aa, synthetic construct
GSGQNQQTVMTARA

SEQ ID NO: 802 - protein, 14 aa, synthetic construct
GSGMPASRLQNQQT

SEQ ID NO: 803 - protein, 14 aa, synthetic construct
GVVRNHQSGQNQQT

SEQ ID NO: 804 - protein, 14 aa, synthetic construct
GSGQNQHSVQVRQT

SEQ ID NO: 805 - protein, 14 aa, synthetic construct
GSGQNTGHLTMQQT

SEQ ID NO: 806 - protein, 14 aa, synthetic construct
GSGQNQQYAGKILT

SEQ ID NO: 807 - protein, 14 aa, synthetic construct
GSGNPHVRNQNQQT

SEQ ID NO: 808 - protein, 14 aa, synthetic construct
GSGQNGGSSNRQQT

SEQ ID NO: 809 - protein, 14 aa, synthetic construct
GSGQRLSQGVNHQT

SEQ ID NO: 810 - protein, 14 aa, synthetic construct
GSGQNAHAKEGQQT

SEQ ID NO: 811 - protein, 14 aa, synthetic construct
GSSPAPNSGQNQQT

SEQ ID NO: 812 - protein, 14 aa, synthetic construct
GLAHKTSSGQNQQT

SEQ ID NO: 813 - protein, 14 aa, synthetic construct
GSGQNQQTPGAHKT

SEQ ID NO: 814 - protein, 14 aa, synthetic construct
GSGQNQQSLSGSFT

SEQ ID NO: 815 - protein, 14 aa, synthetic construct
GSGQNQQSTGTSRT

SEQ ID NO: 816 - protein, 14 aa, synthetic construct
GSGQNQQTVQSNLV

SEQ ID NO: 817 - protein, 14 aa, synthetic construct
GSGQNQQLGSRQCT

SEQ ID NO: 818 - protein, 14 aa, synthetic construct
GSGQNQYLRLELQT

SEQ ID NO: 819 - protein, 14 aa, synthetic construct
GSGQNQQTSPRLQT

SEQ ID NO: 820 - protein, 14 aa, synthetic construct
GSGQNQQTTSSNMT

SEQ ID NO: 821 - protein, 14 aa, synthetic construct
GTASTYNSGQNQQT

SEQ ID NO: 822 - protein, 14 aa, synthetic construct
GSGQNQQTMPQHKI

SEQ ID NO: 823 - protein, 14 aa, synthetic construct
GSGQSHLHTGNQQT

SEQ ID NO: 824 - protein, 14 aa, synthetic construct
GVKGVGHSGQNQQT

SEQ ID NO: 825 - protein, 14 aa, synthetic construct
GSGKVTKQSQNQQT

SEQ ID NO: 826 - protein, 14 aa, synthetic construct
GSGQNQQTALEKSL

SEQ ID NO: 827 - protein, 14 aa, synthetic construct
GSGYKDTYGQNQQT

SEQ ID NO: 828 - protein, 14 aa, synthetic construct
GSGQNQQSGTFLST

SEQ ID NO: 829 - protein, 14 aa, synthetic construct
GSGQNTGQHMMQQT

SEQ ID NO: 830 - protein, 14 aa, synthetic construct
GSGKNQQRPGLDQT

SEQ ID NO: 831 - protein, 14 aa, synthetic construct
GSGQSREISLNQQT

SEQ ID NO: 832 - protein, 14 aa, synthetic construct
GTPTSPSSGQNQQT

SEQ ID NO: 833 - protein, 14 aa, synthetic construct
GKPAGGLSGQNQQT

SEQ ID NO: 834 - protein, 14 aa, synthetic construct
GSGQNHRSADMQQT

SEQ ID NO: 835 - protein, 14 aa, synthetic construct
GSGQNQQTLPSLSL

SEQ ID NO: 836 - protein, 14 aa, synthetic construct
GSPYMGATGQNQQT

SEQ ID NO: 837 - protein, 14 aa, synthetic construct
GSGHAKAVGQNQQT

SEQ ID NO: 838 - protein, 14 aa, synthetic construct
GHMKGVTSGQNQQT

SEQ ID NO: 839 - protein, 14 aa, synthetic construct
GSGQNQKILTLDQT

SEQ ID NO: 840 - protein, 14 aa, synthetic construct
GSGQNQQTKVGHSA

SEQ ID NO: 841 - protein, 14 aa, synthetic construct
GIARTTISGQNQQT

SEQ ID NO: 842 - protein, 14 aa, synthetic construct
GSGQNQQTSVGFRT

SEQ ID NO: 843 - protein, 14 aa, synthetic construct
GSGQNQQTMIANIR

SEQ ID NO: 844 - protein, 14 aa, synthetic construct
GDMTRSSSGQNQQT

SEQ ID NO: 845 - protein, 14 aa, synthetic construct
GSGHMSDLRQNQQT

SEQ ID NO: 846 - protein, 14 aa, synthetic construct
GRGAVMASGQNQQT

SEQ ID NO: 847 - protein, 14 aa, synthetic construct
GSGQNQQLSGKSVT

SEQ ID NO: 848 - protein, 14 aa, synthetic construct
GSHTLVVSGQNQQT

SEQ ID NO: 849 - protein, 14 aa, synthetic construct
GSGPWSAGLQNQQT

SEQ ID NO: 850 - protein, 14 aa, synthetic construct
GSGQHSPHALNQQT

SEQ ID NO: 851 - protein, 14 aa, synthetic construct
GSGQNQQPNSGSMT

SEQ ID NO: 852 - protein, 14 aa, synthetic construct
GSGLAHLGGQNQQT

SEQ ID NO: 853 - protein, 14 aa, synthetic construct
GSSVRYEPKQNQQT

SEQ ID NO: 854 - protein, 14 aa, synthetic construct
GSGQNQQARPLELT

SEQ ID NO: 855 - protein, 14 aa, synthetic construct
GSGQPRSTGINQQT

SEQ ID NO: 856 - protein, 14 aa, synthetic construct
GSGQNQANWVKVQT

SEQ ID NO: 857 - protein, 14 aa, synthetic construct
GSGHLFQSGQNQQT

SEQ ID NO: 858 - protein, 14 aa, synthetic construct
GSGQNRGISISQQT

SEQ ID NO: 859 - protein, 14 aa, synthetic construct
GSGTHYDNRQNQQT

SEQ ID NO: 860 - protein, 14 aa, synthetic construct
GSGQNQQTSTTPLP

SEQ ID NO: 861 - protein, 14 aa, synthetic construct
GSGQVHASQVNQKT

SEQ ID NO: 862 - protein, 14 aa, synthetic construct
GSSGHRESGQNQQT

SEQ ID NO: 863 - protein, 14 aa, synthetic construct
GLSAEKSSGQNQQT

SEQ ID NO: 864 - protein, 14 aa, synthetic construct
GSGQEHRSLANQQT

SEQ ID NO: 865 - protein, 14 aa, synthetic construct
GSGQTVVRIANQQT

SEQ ID NO: 866 - protein, 14 aa, synthetic construct
GSGQNVSSVHRQQT

SEQ ID NO: 867 - protein, 14 aa, synthetic construct
GSGASRMSIQNQQT

SEQ ID NO: 868 - protein, 14 aa, synthetic construct
GVAFIGSSGQNQQT

SEQ ID NO: 869 - protein, 14 aa, synthetic construct
GSGQNQQTVPTRQT

SEQ ID NO: 870 - protein, 14 aa, synthetic construct
GSGQAAKSSQNQQT

SEQ ID NO: 871 - protein, 14 aa, synthetic construct
GSGQNQQVAIRTST

SEQ ID NO: 872 - protein, 14 aa, synthetic construct
GSVHMQNAGQNQQT

SEQ ID NO: 873 - protein, 14 aa, synthetic construct
GSGMRQAGVQNQQT

SEQ ID NO: 874 - protein, 14 aa, synthetic construct
GSGQNQQVGGKTVT

SEQ ID NO: 875 - protein, 14 aa, synthetic construct
GVHDMRVSGQNQQT

SEQ ID NO: 876 - protein, 14 aa, synthetic construct
GSGQHVSVANNQQT

SEQ ID NO: 877 - protein, 14 aa, synthetic construct
GSAAMSVRGQNQQT

SEQ ID NO: 878 - protein, 14 aa, synthetic construct
GVSRGGPSGQNQQT

SEQ ID NO: 879 - protein, 14 aa, synthetic construct
GSGQMVHTIGNQQT

SEQ ID NO: 880 - protein, 14 aa, synthetic construct
GRGGSMAETQNQQT

SEQ ID NO: 881 - protein, 14 aa, synthetic construct
GSGHTNPTRQNQQT

SEQ ID NO: 882 - protein, 14 aa, synthetic construct
GSGEAARYEQNQQT

SEQ ID NO: 883 - protein, 14 aa, synthetic construct
GSGQNERHLVLQQT

SEQ ID NO: 884 - protein, 14 aa, synthetic construct
GSGQNQQSKQQVLT

SEQ ID NO: 885 - protein, 14 aa, synthetic construct
GSGQARAHRGNQQT

SEQ ID NO: 886 - protein, 14 aa, synthetic construct
GSGQNQQPLDTSRT

SEQ ID NO: 887 - protein, 14 aa, synthetic construct
GSGQNQQLANMVTT

SEQ ID NO: 888 - protein, 14 aa, synthetic construct
GSGQMKDLHRNQQT

SEQ ID NO: 889 - protein, 14 aa, synthetic construct
GSGQNQHLSSFVQT

SEQ ID NO: 890 - protein, 14 aa, synthetic construct
GSGQNQQPSSRVTT

SEQ ID NO: 891 - protein, 14 aa, synthetic construct
GSGQNQQLAITLGT

SEQ ID NO: 892 - protein, 14 aa, synthetic construct
GSGQNQQTVGNPAT

SEQ ID NO: 893 - protein, 14 aa, synthetic construct
GSGQNQGRAHPMQT

SEQ ID NO: 894 - protein, 14 aa, synthetic construct
GSGQLIASVVNQQT

SEQ ID NO: 895 - protein, 14 aa, synthetic construct
GSSVRSLVGQNQQT

SEQ ID NO: 896 - protein, 14 aa, synthetic construct
GGAGSAHSGQNQQT

SEQ ID NO: 897 - protein, 14 aa, synthetic construct
GSDQNQQTMSSTRT

SEQ ID NO: 898 - protein, 14 aa, synthetic construct
GSGQNQQMAGAFRT

SEQ ID NO: 899 - protein, 14 aa, synthetic construct
GSLGNLQRGQNQQT

SEQ ID NO: 900 - protein, 14 aa, synthetic construct
GSGPSISHGQNQQT

SEQ ID NO: 901 - protein, 14 aa, synthetic construct
GSGQNQQSSFNVQT

SEQ ID NO: 902 - protein, 14 aa, synthetic construct
GSGQNQQTGQATHN

SEQ ID NO: 903 - protein, 14 aa, synthetic construct
VSGSPHSKAQNQQT

SEQ ID NO: 904 - protein, 14 aa, synthetic construct
CSGSPHSKAQNQQT

SEQ ID NO: 905 - protein, 14 aa, synthetic construct
GSGSPHRKAQNQQT

SEQ ID NO: 906 - protein, 14 aa, synthetic construct
GRGSPHSKAQNQQT

SEQ ID NO: 907 - protein, 14 aa, synthetic construct
GSGSPHSKAQNKQT

SEQ ID NO: 908 - protein, 14 aa, synthetic construct
GSGSPHSKAQTQQT

SEQ ID NO: 909 - protein, 14 aa, synthetic construct
GSGSTHASRQNQQT

SEQ ID NO: 910 - protein, 14 aa, synthetic construct
GSGSPHKYGQNQQT

SEQ ID NO: 911 - protein, 14 aa, synthetic construct
GSGSPHKFGQNQQT

SEQ ID NO: 912 - protein, 14 aa, synthetic construct
VSGSPHKFGQNQQT

SEQ ID NO: 913 - protein, 14 aa, synthetic construct
GSGSPHSKAQNHQT

SEQ ID NO: 914 - protein, 14 aa, synthetic construct
GSGSPHSKAQHQQT

SEQ ID NO: 915 - protein, 14 aa, synthetic construct
GSGSPHKTYQNQQT

SEQ ID NO: 916 - protein, 14 aa, synthetic construct
VSGSPHASRQNQQT

SEQ ID NO: 917 - protein, 14 aa, synthetic construct
GSGSPHKFGKNQQT

SEQ ID NO: 918 - protein, 14 aa, synthetic construct
GSGSPHASRQNQHT

SEQ ID NO: 919 - protein, 14 aa, synthetic construct
GSHSPHKSGQNQQT

SEQ ID NO: 920 - protein, 14 aa, synthetic construct
GSGQNQQRRMSPST

SEQ ID NO: 921 - protein, 14 aa, synthetic construct
GSGSPHSKPQNQQT

SEQ ID NO: 922 - protein, 14 aa, synthetic construct
GSGSPHKFGQKQQT

SEQ ID NO: 923 - protein, 14 aa, synthetic construct
VSGSPHGARQNQQT

SEQ ID NO: 924 - protein, 14 aa, synthetic construct
GSGSPHSKAQKQQT

SEQ ID NO: 925 - protein, 14 aa, synthetic construct
GSHSPHKRGQNQQT

SEQ ID NO: 926 - protein, 14 aa, synthetic construct
GSGQNRQRLKGLET

SEQ ID NO: 927 - protein, 14 aa, synthetic construct
GSGSPHKLGQNQQT

SEQ ID NO: 928 - protein, 14 aa, synthetic construct
GSGSPHKTSKNQQT

SEQ ID NO: 929 - protein, 14 aa, synthetic construct
GSGSPHKIGQNQQT

SEQ ID NO: 930 - protein, 14 aa, synthetic construct
GSGQDSPHVRNQQT

SEQ ID NO: 931 - protein, 14 aa, synthetic construct
GSGSPHKTSQNQQT

SEQ ID NO: 932 - protein, 14 aa, synthetic construct
GSGSPHASRKNQQT

SEQ ID NO: 933 - protein, 14 aa, synthetic construct
GSHSPHKSGQKQQT

SEQ ID NO: 934 - protein, 14 aa, synthetic construct
GSGSPHKTSQKQQT

SEQ ID NO: 935 - protein, 14 aa, synthetic construct
GSGSPHVRGQNKQT

SEQ ID NO: 936 - protein, 14 aa, synthetic construct
GSGSPHKTTQNQQT

SEQ ID NO: 937 - protein, 14 aa, synthetic construct
GSGPVRALRQNQQT

SEQ ID NO: 938 - protein, 14 aa, synthetic construct
GSGSPHVRGQKQQT

SEQ ID NO: 939 - protein, 14 aa, synthetic construct
CSGSPHKTSQNQQT

SEQ ID NO: 940 - protein, 14 aa, synthetic construct
CSHSPHKSGQNQQT

SEQ ID NO: 941 - protein, 6 aa, synthetic construct
SPHSKA

SEQ ID NO: 942 - DNA, 18 bp, synthetic construct
  source 1..18: mol_type = other DNA
agcccacacagcaaagca

SEQ ID NO: 943 - protein, 8 aa, synthetic construct
HDSPHKSG

SEQ ID NO: 944 - DNA, 24 bp, synthetic construct
  source 1..24: mol_type = other DNA
cacgacagcccacacaaaagcgga

SEQ ID NO: 945 - protein, 6 aa, synthetic construct
SPHSKA

SEQ ID NO: 946 - protein, 6 aa, synthetic construct
SPHKSG

SEQ ID NO: 947 - protein, 6 aa, synthetic construct
SPHARM

SEQ ID NO: 948 - protein, 6 aa, synthetic construct
SPHVKS

SEQ ID NO: 949 - protein, 6 aa, synthetic construct
SPHASR

SEQ ID NO: 950 - protein, 6 aa, synthetic construct
SPHVKI

SEQ ID NO: 951 - protein, 6 aa, synthetic construct
SPHKSR

SEQ ID NO: 952 - protein, 6 aa, synthetic construct
SPHSLR

SEQ ID NO: 953 - protein, 6 aa, synthetic construct
SPHSKW

SEQ ID NO: 954 - protein, 6 aa, synthetic construct
SPHKKN

SEQ ID NO: 955 - protein, 6 aa, synthetic construct
SPHVRM

SEQ ID NO: 956 - protein, 6 aa, synthetic construct
SPHRKA

SEQ ID NO: 957 - protein, 6 aa, synthetic construct
SPHKFG

SEQ ID NO: 958 - protein, 6 aa, synthetic construct
SPHKIG

SEQ ID NO: 959 - protein, 6 aa, synthetic construct
SPHKLG

SEQ ID NO: 960 - protein, 6 aa, synthetic construct
SPHSKL

SEQ ID NO: 961 - protein, 6 aa, synthetic construct
SPHSRG

SEQ ID NO: 962 - protein, 6 aa, synthetic construct
SPHSKS

SEQ ID NO: 963 - protein, 6 aa, synthetic construct
SPHKTS

SEQ ID NO: 964 - protein, 6 aa, synthetic construct
SPHKTT

SEQ ID NO: 965 - protein, 6 aa, synthetic construct
SPHKTY

SEQ ID NO: 966 - protein, 6 aa, synthetic construct
SPHKYG

SEQ ID NO: 967 - protein, 6 aa, synthetic construct
SPHSKD

SEQ ID NO: 968 - protein, 6 aa, synthetic construct
SPHSKP

SEQ ID NO: 969 - protein, 6 aa, synthetic construct
SPHSRA

SEQ ID NO: 970 - protein, 6 aa, synthetic construct
SPHSSR

SEQ ID NO: 971 - protein, 6 aa, synthetic construct
SPHWKA

SEQ ID NO: 972 - protein, 6 aa, synthetic construct
SPHTRG

SEQ ID NO: 973 - protein, 6 aa, synthetic construct
SPHVRG

SEQ ID NO: 974 - protein, 6 aa, synthetic construct
SPHKRG

SEQ ID NO: 975 - protein, 6 aa, synthetic construct
SPHGAR

SEQ ID NO: 976 - protein, 6 aa, synthetic construct
SPHRSG

SEQ ID NO: 977 - protein, 6 aa, synthetic construct
SPHKSA

SEQ ID NO: 978 - protein, 6 aa, synthetic construct
SPHSKR

SEQ ID NO: 979 - protein, 6 aa, synthetic construct
SPHFLR

SEQ ID NO: 980 - protein, 6 aa, synthetic construct
SPHVRR

SEQ ID NO: 981 - protein, 742 aa, synthetic construct
MAADGYLPDWLEDNLSEGIREWWALKPGAPQPKANQQHQDNARGLVLPGYKYLGPGNGLDKGEPVNAADAAALEHDKAYDQQLKAGDNPYLKYNHADAEFQERLKEDTSFGGNLGRAVFQAKKRLLEPLGLVEEAAKTAPGKKRPVEQSPQEPDSSAGIGKSGAQPAKKRLNFGQTGDTESVPDPQPIGEPPAAPSGVGSLTMASGGGAPVADNNEGADGVGSSSGNWHCDSQWLGDRVITTSTRTWALPTYNNHLYKQISNSTSGGSSNDNAYFGYSTPWGYFDFNRFHCHFSPRDWQRLINNNWGFRPKRLNFKLFNIQVKEVTDNNGVKTIANNLTSTVQVFTDSDYQLPYVLGSAHEGCLPPFPADVFMIPQYGYLTLNDGSQAVGRSSFYCLEYFPSQMLRTGNNFQFSYEFENVPFHSSYAHSQSLDRLMNPLIDQYLYYLSKTINGSGSPHSKAQNQQTLKFSVAGPSNMAVQGRNYIPGPSYRQQRVSTTVTQNNNSEFAWPGASSWALNGRNSLMNPGPAMASHKEGEDRFFPLSGSLIFGKQGTGRDNVDADKVMITNEEEIKTTNPVATESYGQVATNHQSAQAQAQTGWVQNQGILPGMVWQDRDVYLQGPIWAKIPHTDGNFHPSPLMGGFGMKHPPPQILIKNTPVPADPPTAFNKDKLNSFITQYSTGQVSVEIEWELQKENSKRWNPEIQYTSNYYKSNNVEFAVNTEGVYSEPRPIGTRYLTRNL

SEQ ID NO: 982 - protein, 742 aa, synthetic construct
MAADGYLPDWLEDNLSEGIREWWALKPGAPQPKANQQHQDNARGLVLPGYKYLGPGNGLDKGEPVNAADAAALEHDKAYDQQLKAGDNPYLKYNHADAEFQERLKEDTSFGGNLGRAVFQAKKRLLEPLGLVEEAAKTAPGKKRPVEQSPQEPDSSAGIGKSGAQPAKKRLNFGQTGDTESVPDPQPIGEPPAAPSGVGSLTMASGGGAPVADNNEGADGVGSSSGNWHCDSQWLGDRVITTSTRTWALPTYNNHLYKQISNSTSGGSSNDNAYFGYSTPWGYFDFNRFHCHFSPRDWQRLINNNWGFRPKRLNFKLFNIQVKEVTDNNGVKTIANNLTSTVQVFTDSDYQLPYVLGSAHEGCLPPFPADVFMIPQYGYLTLNDGSQAVGRSSFYCLEYFPSQMLRTGNNFQFSYEFENVPFHSSYAHSQSLDRLMNPLIDQYLYYLSKTINGHDSPHKSGQNQQTLKFSVAGPSNMAVQGRNYIPGPSYRQQRVSTTVTQNNNSEFAWPGASSWALNGRNSLMNPGPAMASHKEGEDRFFPLSGSLIFGKQGTGRDNVDADKVMITNEEEIKTTNPVATESYGQVATNHQSAQAQAQTGWVQNQGILPGMVWQDRDVYLQGPIWAKIPHTDGNFHPSPLMGGFGMKHPPPQILIKNTPVPADPPTAFNKDKLNSFITQYSTGQVSVEIEWELQKENSKRWNPEIQYTSNYYKSNNVEFAVNTEGVYSEPRPIGTRYLTRNL

SEQ ID NO: 983 - DNA, 2229 bp, synthetic construct
  source 1..2229: mol_type = other DNA
atggctgccgatggttatcttccagattggctcgaggacaaccttagtgaaggaattcgcgagtggtgggctttgaaacctggagcccctcaacccaaggcaaatcaacaacatcaagacaacgctcgaggtcttgtgcttccgggttacaaataccttggacccggcaacggactcgacaagggggagccggtcaacgcagcagacgcggcggccctcgagcacgacaaggcctacgaccagcagctcaaggccggagacaacccgtacctcaagtacaaccacgccgacgccgagttccaggagcggctcaaagaagatacgtcttttgggggcaacctcgggcgagcagtcttccaggccaaaaagaggcttcttgaacctcttggtctggttgaggaagcggctaagacggctcctggaaagaagaggcctgtagagcagtctcctcaggaaccggactcctccgcgggtattggcaaatcgggtgcacagcccgctaaaaagagactcaatttcggtcagactggcgacacagagtcagtcccagaccctcaaccaatcggagaacctcccgcagccccctcaggtgtgggatctcttacaatggcttcaggtggtggcgcaccagtggcagacaataacgaaggtgccgatggagtgggtagttcctcgggaaattggcattgcgattcccaatggctgggggacagagtcatcaccaccagcacccgaacctgggccctgcccacctacaacaatcacctctacaagcaaatctccaacagcacatctggaggatcttcaaatgacaacgcctacttcggctacagcaccccctgggggtattttgacttcaacagattccactgccacttctcaccacgtgactggcagcgactcatcaacaacaactggggattccggcctaagcgactcaacttcaagctcttcaacattcaggtcaaagaggttacggacaacaatggagtcaagaccatcgccaataaccttaccagcacggtccaggtcttcacggactcagactatcagctcccgtacgtgctcgggtcggctcacgagggctgcctcccgccgttcccagcggacgttttcatgattcctcagtacgggtatctgacgcttaatgatggaagccaggccgtgggtcgttcgtccttttactgcctggaatatttcccgtcgcaaatgctaagaacgggtaacaacttccagttcagctacgagtttgagaacgtacctttccatagcagctacgctcacagccaaagcctggaccgactaatgaatccactcatcgaccaatacttgtattacttgagtaaaacaattaacggaagcggaagcccacacagcaaagcacaaaaccaacagaccttgaagttttcggtagctggtcctagcaacatggctgtccagggaagaaactacatacctggacccagctaccgacaacaacgtgtctcaaccactgtgactcaaaacaacaacagcgaatttgcttggcctggagcttcttcttgggctctcaatggacgtaatagcttgatgaatcctggacctgctatggccagccacaaagaaggagaggaccgtttctttcctttgtctggatctttaatttttggcaaacaaggaactggaagagacaacgtggatgcggacaaagtcatgataaccaacgaagaagaaattaaaactactaacccggtagcaacggagtcctatggacaagtggccacaaaccaccagagtgcccaagcacaggcgcagaccggctgggttcaaaaccaaggaatacttccgggtatggtttggcaggacagagatgtgtacctgcaaggacccatttgggccaaaattcctcacacggacggcaactttcacccttctccgctgatgggagggtttggaatgaagcacccgcctcctcagatcctcatcaaaaacacacctgtacctgcggatcctccaacggccttcaacaaggacaagctgaactctttcatcacccagtattctactggccaagtcagcgtggagatcgagtgggagctgcagaaggaaaacagcaagcgctggaacccggagatccagtacacttccaactattacaagtctaataatgttgaatttgctgttaatactgaaggtgtatatagtgaaccccgccccattggcacgcggtatttaacgaggaacttataa

SEQ ID NO: 984 - DNA, 2229 bp, synthetic construct
  source 1..2229: mol_type = other DNA
atggctgccgatggttatcttccagattggctcgaggacaaccttagtgaaggaattcgcgagtggtgggctttgaaacctggagcccctcaacccaaggcaaatcaacaacatcaagacaacgctcgaggtcttgtgcttccgggttacaaataccttggacccggcaacggactcgacaagggggagccggtcaacgcagcagacgcggcggccctcgagcacgacaaggcctacgaccagcagctcaaggccggagacaacccgtacctcaagtacaaccacgccgacgccgagttccaggagcggctcaaagaagatacgtcttttgggggcaacctcgggcgagcagtcttccaggccaaaaagaggcttcttgaacctcttggtctggttgaggaagcggctaagacggctcctggaaagaagaggcctgtagagcagtctcctcaggaaccggactcctccgcgggtattggcaaatcgggtgcacagcccgctaaaaagagactcaatttcggtcagactggcgacacagagtcagtcccagaccctcaaccaatcggagaacctcccgcagccccctcaggtgtgggatctcttacaatggcttcaggtggtggcgcaccagtggcagacaataacgaaggtgccgatggagtgggtagttcctcgggaaattggcattgcgattcccaatggctgggggacagagtcatcaccaccagcacccgaacctgggccctgcccacctacaacaatcacctctacaagcaaatctccaacagcacatctggaggatcttcaaatgacaacgcctacttcggctacagcaccccctgggggtattttgacttcaacagattccactgccacttctcaccacgtgactggcagcgactcatcaacaacaactggggattccggcctaagcgactcaacttcaagctcttcaacattcaggtcaaagaggttacggacaacaatggagtcaagaccatcgccaataaccttaccagcacggtccaggtcttcacggactcagactatcagctcccgtacgtgctcgggtcggctcacgagggctgcctcccgccgttcccagcggacgttttcatgattcctcagtacgggtatctgacgcttaatgatggaagccaggccgtgggtcgttcgtccttttactgcctggaatatttcccgtcgcaaatgctaagaacgggtaacaacttccagttcagctacgagtttgagaacgtacctttccatagcagctacgctcacagccaaagcctggaccgactaatgaatccactcatcgaccaatacttgtattacttgagtaaaacaattaacggacacgacagcccacacaaaagcggacaaaaccaacagaccttgaagttttcggtagctggtcctagcaacatggctgtccagggaagaaactacatacctggacccagctaccgacaacaacgtgtctcaaccactgtgactcaaaacaacaacagcgaatttgcttggcctggagcttcttcttgggctctcaatggacgtaatagcttgatgaatcctggacctgctatggccagccacaaagaaggagaggaccgtttctttcctttgtctggatctttaatttttggcaaacaaggaactggaagagacaacgtggatgcggacaaagtcatgataaccaacgaagaagaaattaaaactactaacccggtagcaacggagtcctatggacaagtggccacaaaccaccagagtgcccaagcacaggcgcagaccggctgggttcaaaaccaaggaatacttccgggtatggtttggcaggacagagatgtgtacctgcaaggacccatttgggccaaaattcctcacacggacggcaactttcacccttctccgctgatgggagggtttggaatgaagcacccgcctcctcagatcctcatcaaaaacacacctgtacctgcggatcctccaacggccttcaacaaggacaagctgaactctttcatcacccagtattctactggccaagtcagcgtggagatcgagtgggagctgcagaaggaaaacagcaagcgctggaacccggagatccagtacacttccaactattacaagtctaataatgttgaatttgctgttaatactgaaggtgtatatagtgaaccccgccccattggcacgcggtatttaacgaggaacttataa

SEQ ID NO: 985 - protein, 6 aa, synthetic construct
STHASR

SEQ ID NO: 986 - protein, 6 aa, synthetic construct
SQHKSG

SEQ ID NO: 987-1261 - skipped (275 entries)

SEQ ID NO: 1262 - protein, 7 aa, synthetic construct
TLAVPFK

SEQ ID NO: 1263-1723 - skipped (461 entries)

SEQ ID NO: 1724 - DNA, 12 bp, synthetic construct
  source 1..12: mol_type = other DNA
agaaagaggcga

SEQ ID NO: 1725 - DNA, 12 bp, synthetic construct
  source 1..12: mol_type = other DNA
cgggccaagcgg

SEQ ID NO: 1726 - DNA, 54 bp, synthetic construct
  source 1..54: mol_type = other DNA
gagggcagaggaagtcttctaacatgcggtgacgtggaggagaatcccggccct

SEQ ID NO: 1727 - DNA, 75 bp, synthetic construct
  source 1..75: mol_type = other DNA
ggaagcggagtgaaacagactttgaattttgaccttctcaagttggcgggagacgtggagtccaaccctggacct

SEQ ID NO: 1728 - DNA, 66 bp, synthetic construct
  source 1..66: mol_type = other DNA
ggaagcggagctactaacttcagcctgctgaagcaggctggagacgtggaggagaaccctggacct

SEQ ID NO: 1729 - DNA, 18 bp, synthetic construct
  source 1..18: mol_type = other DNA
tccggaggcggcggcagc

SEQ ID NO: 1730 - DNA, 45 bp, synthetic construct
  source 1..45: mol_type = other DNA
ggtggtggtggtagcggcggcggcggctctggtggtggtggatcc

SEQ ID NO: 1731 - DNA, 75 bp, synthetic construct
  source 1..75: mol_type = other DNA
ggcggaggtggctccggaggcggaggcagcggcggaggtgggtctggcggaggcgggtgcggcggaggtggctcc

SEQ ID NO: 1732 - DNA, 609 bp, synthetic construct
  source 1..609: mol_type = other DNA
aattccgcccctctcccccccccccctctccctcccccccccctaacgttactggccgaagccgcttggaataaggccggtgtgcgtttgtctatatgttattttccaccatattgccgtcttttggcaatgtgagggcccggaaacctggccctgtcttcttgacgagcattcctaggggtctttcccctctcgccaaaggaatgcaaggtctgttgaatgtcgtgaaggaagcagttcctctggaagcttcttgaagacaaacaacgtctgtagcgaccctttgcaggcagcggaaccccccacctggcgacaggtgcctctgcggccaaaagccacgtgtataagatacacctgcaaaggcggcacaaccccagtgccacgttgtgagttggatagttgtggaaagagtcaaatggctctcctcaagcgtattcaacaaggggctgaaggatgcccagaaggtaccccattgtatgggatctgatctggggcctcggtgcacatgctttacatgtgtttagtcgaggttaaaaaaacgtctaggccccccgaaccacggggacgtggttttcctttgaaaaacacgatgataatatggccacaacc

SEQ ID NO: 1733 - DNA, 623 bp, synthetic construct
  source 1..623: mol_type = other DNA
taacgaattccgcccctctcccccccccccctctccctcccccccccctaacgttactggccgaagccgcttggaataaggccggtgtgcgtttgtctatatgttattttccaccatattgccgtcttttggcaatgtgagggcccggaaacctggccctgtcttcttgacgagcattcctaggggtctttcccctctcgccaaaggaatgcaaggtctgttgaatgtcgtgaaggaagcagttcctctggaagcttcttgaagacaaacaacgtctgtagcgaccctttgcaggcagcggaaccccccacctggcgacaggtgcctctgcggccaaaagccacgtgtataagatacacctgcaaaggcggcacaaccccagtgccacgttgtgagttggatagttgtggaaagagtcaaatggctctcctcaagcgtattcaacaaggggctgaaggatgcccagaaggtaccccattgtatgggatctgatctggggcctcggtgcacatgctttacatgtgtttagtcgaggttaaaaaaacgtctaggccccccgaaccacggggacgtggttttcctttgaaaaacacgatgataatatggccacaaccgccgccacc

SEQ ID NO: 1734 - DNA, 54 bp, synthetic construct
  source 1..54: mol_type = other DNA
gtggagaggaagtgctgcgtggagtgcccaccatgccctgcccctcctgtggcc

SEQ ID NO: 1735 - DNA, 108 bp, synthetic construct
  source 1..108: mol_type = other DNA
gagctcaaaaccccacttggtgacacaactcacacatgcccacggtgcccagagcccaaatcttgtgacacacctcccccgtgcccacggtgcccagcacctgaactc

SEQ ID NO: 1736 - DNA, 153 bp, synthetic construct
  source 1..153: mol_type = other DNA
gagctcaaaaccccacttggtgacacaactcacacatgcccacggtgcccagagcccaaatcttgtgacacacctcccccgtgcccacggtgcccagagcccaaatcttgtgacacacctcccccatgcccacggtgcccagcacctgaactc

SEQ ID NO: 1737 - DNA, 198 bp, synthetic construct
  source 1..198: mol_type = other DNA
gagctcaaaaccccacttggtgacacaactcacacatgcccacggtgcccagagcccaaatcttgtgacacacctcccccgtgcccacggtgcccagagcccaaatcttgtgacacacctcccccatgcccacggtgcccagagcccaaatcttgtgacacacctcccccgtgcccaaggtgcccagcacctgaactc

SEQ ID NO: 1738 - DNA, 45 bp, synthetic construct
  source 1..45: mol_type = other DNA
gtgcccagggattgtggttgtaagccttgcatatgtacagtccca

SEQ ID NO: 1739 - DNA, 18 bp, synthetic construct
  source 1..18: mol_type = other DNA
gtgcccagggattgtggt

SEQ ID NO: 1740-1753 - skipped (14 entries)

SEQ ID NO: 1754 - protein, 18 aa, synthetic construct
KAEIGHDSPHKSGQNQQT

SEQ ID NO: 1755-1799 - skipped (45 entries)

SEQ ID NO: 1800 - protein, 13 aa, synthetic construct
GHDSPHKSGQNQQ

SEQ ID NO: 1801 - protein, 13 aa, synthetic construct
GSGSPHSKAQNQQ

SEQ ID NO: 1802 - protein, 13 aa, synthetic construct
GSGSPHSKAQNRH

SEQ ID NO: 1803 - protein, 13 aa, synthetic construct
GSGSPHSKVQNQQ

SEQ ID NO: 1804 - protein, 13 aa, synthetic construct
MSGSPHSKAQNQQ

SEQ ID NO: 1805 - protein, 13 aa, synthetic construct
GRGSPHSKAQNQQ

SEQ ID NO: 1806 - protein, 13 aa, synthetic construct
RNGSPHSKAQNQQ

SEQ ID NO: 1807 - protein, 13 aa, synthetic construct
GSGSPHSKARDQQ

SEQ ID NO: 1808 - protein, 13 aa, synthetic construct
GSGSPHSKAPNLQ

SEQ ID NO: 1809 - protein, 13 aa, synthetic construct
TSGSPHSKAQNQQ

SEQ ID NO: 1810 - protein, 13 aa, synthetic construct
GSGSPHSKAHVRQ

SEQ ID NO: 1811 - protein, 13 aa, synthetic construct
GSGSPHSKAPNQH

SEQ ID NO: 1812 - protein, 13 aa, synthetic construct
ISGSPHSKAQNQQ

SEQ ID NO: 1813 - protein, 13 aa, synthetic construct
GPGSPHSKAHNQQ

SEQ ID NO: 1814 - protein, 13 aa, synthetic construct
GSGSPHSKTQSQQ

SEQ ID NO: 1815 - protein, 13 aa, synthetic construct
ESGSPHSKAQNQQ

SEQ ID NO: 1816 - protein, 13 aa, synthetic construct
GSGSPHSKAQPAK

SEQ ID NO: 1817 - protein, 13 aa, synthetic construct
SSGSPHSKAQNQQ

SEQ ID NO: 1818 - protein, 13 aa, synthetic construct
GNGSPHSKAQNQQ

SEQ ID NO: 1819 - protein, 13 aa, synthetic construct
GSGSPHSKSQTQQ

SEQ ID NO: 1820 - protein, 13 aa, synthetic construct
ASGSPHSKAQNQQ

SEQ ID NO: 1821 - protein, 13 aa, synthetic construct
GSGSPHSKAQNLA

SEQ ID NO: 1822 - protein, 13 aa, synthetic construct
GSGSPHSKSQNQL

SEQ ID NO: 1823 - protein, 13 aa, synthetic construct
NSGSPHSKAQNQQ

SEQ ID NO: 1824 - protein, 13 aa, synthetic construct
GSGSPHSKAQGQQ

SEQ ID NO: 1825 - protein, 13 aa, synthetic construct
VSGSPHSKAQNQQ

SEQ ID NO: 1826 - protein, 13 aa, synthetic construct
GSGSPHSKALNRQ

SEQ ID NO: 1827 - protein, 13 aa, synthetic construct
LSGSPHSKAQNQQ

SEQ ID NO: 1828 - protein, 13 aa, synthetic construct
GSGSPHSKAHNQQ

SEQ ID NO: 1829 - protein, 13 aa, synthetic construct
GSGSPHSKTQNQQ

SEQ ID NO: 1830 - protein, 13 aa, synthetic construct
GGGSPHSKAQTQQ

SEQ ID NO: 1831 - protein, 13 aa, synthetic construct
GSGSPHSKAQNPP

SEQ ID NO: 1832 - protein, 13 aa, synthetic construct
GSGSPHSKAQNLQ

SEQ ID NO: 1833 - protein, 13 aa, synthetic construct
GGGSPHSKAQNQQ

SEQ ID NO: 1834 - protein, 13 aa, synthetic construct
GSGSPHSKAQYQQ

SEQ ID NO: 1835 - protein, 13 aa, synthetic construct
GGGSPHSKAQNKQ

SEQ ID NO: 1836 - protein, 13 aa, synthetic construct
GSGSPHSKAQDQE

SEQ ID NO: 1837 - protein, 13 aa, synthetic construct
KSGSPHSKAQNQQ

SEQ ID NO: 1838 - protein, 13 aa, synthetic construct
GGGSPHSKAQNQL

SEQ ID NO: 1839 - protein, 13 aa, synthetic construct
GSGSPHSKAQNHQ

SEQ ID NO: 1840 - protein, 13 aa, synthetic construct
GSGSPHSKAQDQQ

SEQ ID NO: 1841 - protein, 13 aa, synthetic construct
GGGSPHSKSQNQL

SEQ ID NO: 1842 - protein, 13 aa, synthetic construct
GNGSPHSKAQNKQ

SEQ ID NO: 1843 - protein, 13 aa, synthetic construct
GSGSPHSKGHWQQ

SEQ ID NO: 1844 - protein, 13 aa, synthetic construct
GSGSPHSKAPNQQ

SEQ ID NO: 1845 - protein, 13 aa, synthetic construct
GSGSPHSKAQNQL

SEQ ID NO: 1846 - protein, 13 aa, synthetic construct
GSGSPHSKRPEQQ

SEQ ID NO: 1847 - protein, 13 aa, synthetic construct
GSGSPHSKAQRTM

SEQ ID NO: 1848 - protein, 13 aa, synthetic construct
GNGSPHSKAQNQH

SEQ ID NO: 1849 - protein, 13 aa, synthetic construct
HSGSPHSKAQNQQ

SEQ ID NO: 1850 - protein, 13 aa, synthetic construct
GGGSPHSKALNQQ

SEQ ID NO: 1851 - protein, 13 aa, synthetic construct
GSGSPHSKALHQH

SEQ ID NO: 1852 - protein, 13 aa, synthetic construct
GTGSPHSKAQNHQ

SEQ ID NO: 1853 - protein, 13 aa, synthetic construct
GSGSPHSKAQHRI

SEQ ID NO: 1854 - protein, 13 aa, synthetic construct
GSGSPHSKAQYIH

SEQ ID NO: 1855 - protein, 13 aa, synthetic construct
GGGSPHSKAHNQQ

SEQ ID NO: 1856 - protein, 13 aa, synthetic construct
GSGSPHSKAQKFE

SEQ ID NO: 1857 - protein, 13 aa, synthetic construct
ESGSPHSKAQNHQ

SEQ ID NO: 1858 - protein, 13 aa, synthetic construct
GSGSPHSKAQFPS

SEQ ID NO: 1859 - protein, 13 aa, synthetic construct
PSGSPHSKAQNQQ

SEQ ID NO: 1860 - protein, 13 aa, synthetic construct
GNGSPHSKAQNPL

SEQ ID NO: 1861 - protein, 13 aa, synthetic construct
GGGSPHSKAQSQQ

SEQ ID NO: 1862 - protein, 13 aa, synthetic construct
GSGSPHSKAQAIK

SEQ ID NO: 1863 - protein, 13 aa, synthetic construct
GSGSPHSKGQNRQ

SEQ ID NO: 1864 - protein, 13 aa, synthetic construct
GSGSPHSKAQSQQ

SEQ ID NO: 1865 - protein, 13 aa, synthetic construct
GSVSPHGKAQNQL

SEQ ID NO: 1866 - protein, 13 aa, synthetic construct
ASGSPHSKAQNQL

SEQ ID NO: 1867 - protein, 13 aa, synthetic construct
RSGSPHSKAQNQQ

SEQ ID NO: 1868 - protein, 13 aa, synthetic construct
GSGSPHSKAQYQH

SEQ ID NO: 1869 - protein, 13 aa, synthetic construct
GSGSPHTKAQNPQ

SEQ ID NO: 1870 - protein, 13 aa, synthetic construct
GSGSPHSKGQNPP

SEQ ID NO: 1871 - protein, 13 aa, synthetic construct
GSGSPHSKAQHQL

SEQ ID NO: 1872 - protein, 13 aa, synthetic construct
GSGSPHSKAQSPP

SEQ ID NO: 1873 - protein, 13 aa, synthetic construct
GSGSPHSKAQAKL

SEQ ID NO: 1874 - protein, 13 aa, synthetic construct
GSGSPHSKTKSQQ

SEQ ID NO: 1875 - protein, 13 aa, synthetic construct
GSGSPHSKAQDRP

SEQ ID NO: 1876 - protein, 13 aa, synthetic construct
GIGSPHSKAQNLG

SEQ ID NO: 1877 - protein, 13 aa, synthetic construct
GSGSPHSKAQAFH

SEQ ID NO: 1878 - protein, 13 aa, synthetic construct
GSGSPHSKAQKQQ

SEQ ID NO: 1879 - protein, 13 aa, synthetic construct
GSGSPHSKAQNAQ

SEQ ID NO: 1880 - protein, 13 aa, synthetic construct
WSGSPHSKAQNQQ

SEQ ID NO: 1881 - protein, 13 aa, synthetic construct
GSGSPHSKAHNQL

SEQ ID NO: 1882 - protein, 13 aa, synthetic construct
GNGSPHSKAQNHQ

SEQ ID NO: 1883 - protein, 13 aa, synthetic construct
GGGSPHSKAQNLQ

SEQ ID NO: 1884 - protein, 13 aa, synthetic construct
GSGSPHSKAQKLN

SEQ ID NO: 1885 - protein, 13 aa, synthetic construct
GGGSPHSKSQNQH

SEQ ID NO: 1886 - protein, 13 aa, synthetic construct
GSGSPHSKSQNVQ

SEQ ID NO: 1887 - protein, 13 aa, synthetic construct
GSGSPHSKAQAQQ

SEQ ID NO: 1888 - protein, 13 aa, synthetic construct
DSGSPHSKAQNQQ

SEQ ID NO: 1889 - protein, 13 aa, synthetic construct
ASGSPHSKAPNQQ

SEQ ID NO: 1890 - protein, 13 aa, synthetic construct
GSGSPHSKAQTPP

SEQ ID NO: 1891 - protein, 13 aa, synthetic construct
IDGSPHSKAQNQQ

SEQ ID NO: 1892 - protein, 13 aa, synthetic construct
GSGSPHNKAQNHQ

SEQ ID NO: 1893 - protein, 13 aa, synthetic construct
GSGSPHSKAQPPA

SEQ ID NO: 1894 - protein, 13 aa, synthetic construct
GSGSPHSKAQERP

SEQ ID NO: 1895 - protein, 13 aa, synthetic construct
GSGSPHSKAQDLQ

SEQ ID NO: 1896 - protein, 13 aa, synthetic construct
GGGSPHSKAQNPP

SEQ ID NO: 1897 - protein, 13 aa, synthetic construct
GSGSPHSKAQAMH

SEQ ID NO: 1898 - protein, 13 aa, synthetic construct
GSGSPHSKALNQQ

SEQ ID NO: 1899 - protein, 13 aa, synthetic construct
GSGSPHSKAQHPS

SEQ ID NO: 1900 - protein, 13 aa, synthetic construct
GLGSPHSKSQNQQ

SEQ ID NO: 1901 - protein, 13 aa, synthetic construct
GTGSPHSKAQNQQ

SEQ ID NO: 1902 - protein, 13 aa, synthetic construct
GSGSPHSKAPGLQ

SEQ ID NO: 1903 - protein, 13 aa, synthetic construct
GSGSPHSKAQGIR

SEQ ID NO: 1904 - protein, 13 aa, synthetic construct
GSGSPHSKAQAPA

SEQ ID NO: 1905 - protein, 13 aa, synthetic construct
GSGSPHSKSQSQQ

SEQ ID NO: 1906 - protein, 13 aa, synthetic construct
GSGSPHSKAQIPP

SEQ ID NO: 1907 - protein, 13 aa, synthetic construct
GSGSPHSKAQTQL

SEQ ID NO: 1908 - protein, 13 aa, synthetic construct
GSGSPHSKAQAPS

SEQ ID NO: 1909 - protein, 13 aa, synthetic construct
DAGSPHSKAQNQQ

SEQ ID NO: 1910 - protein, 13 aa, synthetic construct
GSGSPHSKGQNQQ

SEQ ID NO: 1911 - protein, 13 aa, synthetic construct
DGGSPHSKAQNQQ

SEQ ID NO: 1912 - protein, 13 aa, synthetic construct
ASGSPHSKAHNQQ

SEQ ID NO: 1913 - protein, 13 aa, synthetic construct
GSGSPHSKAQNTY

SEQ ID NO: 1914 - protein, 13 aa, synthetic construct
GSGSPHSKSQNQH

SEQ ID NO: 1915 - protein, 13 aa, synthetic construct
GGGSPHSKAQDKQ

SEQ ID NO: 1916 - protein, 13 aa, synthetic construct
GSGSPHSKAQNHL

SEQ ID NO: 1917 - protein, 13 aa, synthetic construct
GSGSPHSKAQIGM

SEQ ID NO: 1918 - protein, 13 aa, synthetic construct
GSGSPHSKALNKQ

SEQ ID NO: 1919 - protein, 13 aa, synthetic construct
GGGSPHSKAQNPQ

SEQ ID NO: 1920 - protein, 13 aa, synthetic construct
GTGSPHSKAPNQL

SEQ ID NO: 1921 - protein, 13 aa, synthetic construct
GSGSPHSKAQLQQ

SEQ ID NO: 1922 - protein, 13 aa, synthetic construct
GGGSPHSKAQYQQ

SEQ ID NO: 1923 - protein, 13 aa, synthetic construct
GGGSPHSKAQHQQ

SEQ ID NO: 1924 - protein, 13 aa, synthetic construct
GSGSPHSKAQRMS

SEQ ID NO: 1925 - protein, 13 aa, synthetic construct
GSGSPHSKAQGIL

SEQ ID NO: 1926 - protein, 13 aa, synthetic construct
GSGSPHSKAQDRQ

SEQ ID NO: 1927 - protein, 13 aa, synthetic construct
GSGSPHSKARDWQ

SEQ ID NO: 1928 - protein, 13 aa, synthetic construct
GSGSPHSKAQNTH

SEQ ID NO: 1929 - protein, 13 aa, synthetic construct
GSGSPHSKAQERS

SEQ ID NO: 1930 - protein, 13 aa, synthetic construct
GSGSPHSKAQNYQ

SEQ ID NO: 1931 - protein, 13 aa, synthetic construct
GSGSPHSKAQRTC

SEQ ID NO: 1932 - protein, 13 aa, synthetic construct
GSGSPHSKAQIGH

SEQ ID NO: 1933 - protein, 13 aa, synthetic construct
GSGSPHSKAQGAI

SEQ ID NO: 1934 - protein, 13 aa, synthetic construct
GSGSPHSKAQVPP

SEQ ID NO: 1935 - protein, 13 aa, synthetic construct
GSGSPHSKAQVQQ

SEQ ID NO: 1936 - protein, 13 aa, synthetic construct
GSGSPHSKALMRQ

SEQ ID NO: 1937 - protein, 13 aa, synthetic construct
GSGSPHSKAQYSV

SEQ ID NO: 1938 - protein, 13 aa, synthetic construct
GSGSPHSKVPNLQ

SEQ ID NO: 1939 - protein, 13 aa, synthetic construct
GSGSPHSKAQAIT

SEQ ID NO: 1940 - protein, 13 aa, synthetic construct
GSGSPHSKAQKTL

SEQ ID NO: 1941 - protein, 13 aa, synthetic construct
GSGSPHSKAQNQW

SEQ ID NO: 1942 - protein, 13 aa, synthetic construct
GSGSPHSKAQLHH

SEQ ID NO: 1943 - protein, 13 aa, synthetic construct
GSGSPHSKAQNII

SEQ ID NO: 1944 - protein, 13 aa, synthetic construct
MEGSPHSKAQNQQ

SEQ ID NO: 1945 - protein, 13 aa, synthetic construct
GSGSPHSKAQGHH

SEQ ID NO: 1946 - protein, 13 aa, synthetic construct
GSGSPHSKAQSKV

SEQ ID NO: 1947 - protein, 13 aa, synthetic construct
GSGSPHSKAQLPS

SEQ ID NO: 1948 - protein, 13 aa, synthetic construct
GSGSPHSKAIGKQ

SEQ ID NO: 1949 - protein, 13 aa, synthetic construct
GGGSPHSKSQNQQ

SEQ ID NO: 1950 - protein, 13 aa, synthetic construct
GSGSPHSKAQAIH

SEQ ID NO: 1951 - protein, 13 aa, synthetic construct
GSGSPHSKAQHGL

SEQ ID NO: 1952 - protein, 13 aa, synthetic construct
GSGSPHSKAQFMC

SEQ ID NO: 1953 - protein, 13 aa, synthetic construct
VSGSPHSKAQGQQ

SEQ ID NO: 1954 - protein, 13 aa, synthetic construct
GGGSPHSKAQNQM

SEQ ID NO: 1955 - protein, 13 aa, synthetic construct
GSGSPHSKAQHLQ

SEQ ID NO: 1956 - protein, 13 aa, synthetic construct
ENGSPHSKAQNQQ

SEQ ID NO: 1957 - protein, 13 aa, synthetic construct
GSGSPHSKTQNHQ

SEQ ID NO: 1958 - protein, 13 aa, synthetic construct
GSGSPHSKAQPAR

SEQ ID NO: 1959 - protein, 13 aa, synthetic construct
GSGSPHSKAQSLQ

SEQ ID NO: 1960 - protein, 13 aa, synthetic construct
GSGSPHSKSQSQL

SEQ ID NO: 1961 - protein, 13 aa, synthetic construct
GSASPHSKAHSQQ

SEQ ID NO: 1962 - protein, 13 aa, synthetic construct
GSGSPHSKAQMPS

SEQ ID NO: 1963 - protein, 13 aa, synthetic construct
GSGSPHSKAQGSL

SEQ ID NO: 1964 - protein, 13 aa, synthetic construct
GSGSPHSKSQNQQ

SEQ ID NO: 1965 - protein, 13 aa, synthetic construct
GNGSPHSKSQNQQ

SEQ ID NO: 1966 - protein, 13 aa, synthetic construct
GSGSPHSKAQVPA

SEQ ID NO: 1967 - protein, 13 aa, synthetic construct
GNGSPHSKAQNLQ

SEQ ID NO: 1968 - protein, 13 aa, synthetic construct
GSGSPHSKAQDKQ

SEQ ID NO: 1969 - protein, 13 aa, synthetic construct
GSGSPHSKAHYQQ

SEQ ID NO: 1970 - protein, 13 aa, synthetic construct
GSGSPHSKAQVPS

SEQ ID NO: 1971 - protein, 13 aa, synthetic construct
GGGSPHSKAQNHQ

SEQ ID NO: 1972 - protein, 13 aa, synthetic construct
GSGSPHSKARGEQ

SEQ ID NO: 1973 - protein, 13 aa, synthetic construct
GGGSPHSKAQYQH

SEQ ID NO: 1974 - protein, 13 aa, synthetic construct
GSGSPHSKAPGQQ

SEQ ID NO: 1975 - protein, 13 aa, synthetic construct
KNGSPHSKAQNQQ

SEQ ID NO: 1976 - protein, 13 aa, synthetic construct
GSGSPHSKRLEQQ

SEQ ID NO: 1977 - protein, 13 aa, synthetic construct
GSGSPHSKAQNQS

SEQ ID NO: 1978 - protein, 13 aa, synthetic construct
GSGSPHSKAQKVI

SEQ ID NO: 1979 - protein, 13 aa, synthetic construct
GSGSPHSKAQNND

SEQ ID NO: 1980 - protein, 13 aa, synthetic construct
GSGSPHSKAQSVH

SEQ ID NO: 1981 - protein, 13 aa, synthetic construct
GSGSPHSKAQPLG

SEQ ID NO: 1982 - protein, 13 aa, synthetic construct
KEGSPHSKAQNQQ

SEQ ID NO: 1983 - protein, 13 aa, synthetic construct
GSGSPHSKAHNQE

SEQ ID NO: 1984 - protein, 13 aa, synthetic construct
GSGSPHSKAQIQQ

SEQ ID NO: 1985 - protein, 13 aa, synthetic construct
GSGSPHSKAQVRN

SEQ ID NO: 1986 - protein, 13 aa, synthetic construct
GSGSPHSKAPSNQ

SEQ ID NO: 1987 - protein, 13 aa, synthetic construct
GSGSPHSKAQVGH

SEQ ID NO: 1988 - protein, 13 aa, synthetic construct
GSGSPHSKAQRDI

SEQ ID NO: 1989 - protein, 13 aa, synthetic construct
GSGSPHSKAQMPN

SEQ ID NO: 1990 - protein, 13 aa, synthetic construct
AIGSPHSKAQNQQ

SEQ ID NO: 1991 - protein, 13 aa, synthetic construct
GSGSPHSKARGLQ

SEQ ID NO: 1992 - protein, 13 aa, synthetic construct
GSGSPHSKLQKQQ

SEQ ID NO: 1993 - protein, 13 aa, synthetic construct
GSGSPHSKAPSLQ

SEQ ID NO: 1994 - protein, 13 aa, synthetic construct
GSGSPHSKAQRDQ

SEQ ID NO: 1995 - protein, 13 aa, synthetic construct
GSGSPHSKNRDQQ

SEQ ID NO: 1996 - protein, 13 aa, synthetic construct
GSGSPHSKAQAKG

SEQ ID NO: 1997 - protein, 13 aa, synthetic construct
GSGSPHSKAQSAH

SEQ ID NO: 1998 - protein, 13 aa, synthetic construct
GNGSPHSKSQNQH

SEQ ID NO: 1999 - protein, 13 aa, synthetic construct
GSGSPHSKSQNHQ

SEQ ID NO: 2000 - protein, 13 aa, synthetic construct
RSGSPHSKAQDQQ

SEQ ID NO: 2001 - protein, 13 aa, synthetic construct
GSGSPHSKAQSTM

SEQ ID NO: 2002 - protein, 13 aa, synthetic construct
GSGSPHSKAQREM

SEQ ID NO: 2003 - protein, 13 aa, synthetic construct
GGGSPHSKSQNRQ

SEQ ID NO: 2004 - protein, 13 aa, synthetic construct
GSGSPHSKAQYRA

SEQ ID NO: 2005 - protein, 13 aa, synthetic construct
GGGSPHSKAQRQQ

SEQ ID NO: 2006 - protein, 13 aa, synthetic construct
GSGSPHSKNQWQQ

SEQ ID NO: 2007 - protein, 13 aa, synthetic construct
GSGSPHSKAQRMN

SEQ ID NO: 2008 - protein, 13 aa, synthetic construct
GSGSPHAKAQNHQ

SEQ ID NO: 2009 - protein, 13 aa, synthetic construct
GSGSPHSKAGDSQ

SEQ ID NO: 2010 - protein, 13 aa, synthetic construct
GSGSPHSKLKSQQ

SEQ ID NO: 2011 - protein, 13 aa, synthetic construct
GSGSPHSKAQKIS

SEQ ID NO: 2012 - protein, 13 aa, synthetic construct
GSGSPHSKAPSMQ

SEQ ID NO: 2013 - protein, 13 aa, synthetic construct
GSGSPHSKASPRQ

SEQ ID NO: 2014 - protein, 13 aa, synthetic construct
GSGSPHSKRMEQQ

SEQ ID NO: 2015 - protein, 13 aa, synthetic construct
GSGSPHSKAQYQN

SEQ ID NO: 2016 - protein, 13 aa, synthetic construct
GSGSPHARMQNQQ

SEQ ID NO: 2017 - protein, 13 aa, synthetic construct
GSGSPHVKSQNQQ

SEQ ID NO: 2018 - protein, 13 aa, synthetic construct
GQDSPHKSGQNQQ

SEQ ID NO: 2019 - protein, 13 aa, synthetic construct
GSGSPHASRQNQQ

SEQ ID NO: 2020 - protein, 13 aa, synthetic construct
GSGSPHASRQNKQ

SEQ ID NO: 2021 - protein, 13 aa, synthetic construct
GSGSPHVKIQNQQ

SEQ ID NO: 2022 - protein, 13 aa, synthetic construct
GSGSPHSKAKNQQ

SEQ ID NO: 2023 - protein, 13 aa, synthetic construct
GSGSPHKKNQNQQ

SEQ ID NO: 2024 - protein, 13 aa, synthetic construct
GSGSPHVRMQNQQ

SEQ ID NO: 2025 - protein, 13 aa, synthetic construct
GSGSPHASRQKQQ

SEQ ID NO: 2026 - protein, 13 aa, synthetic construct
GHSSPHRSGQNQQ

SEQ ID NO: 2027 - protein, 13 aa, synthetic construct
GSGSPHTRGQNQQ

SEQ ID NO: 2028 - protein, 13 aa, synthetic construct
CSGSPHSKAQNQQ

SEQ ID NO: 2029 - protein, 13 aa, synthetic construct
GSGSPHRKAQNQQ

SEQ ID NO: 2030 - protein, 13 aa, synthetic construct
GSGSPHSKAQNKQ

SEQ ID NO: 2031 - protein, 13 aa, synthetic construct
GSGSPHSKAQTQQ

SEQ ID NO: 2032 - protein, 13 aa, synthetic construct
CSGSPHKTSQNQQ

SEQ ID NO: 2033 - protein, 13 aa, synthetic construct
CSHSPHKSGQNQQ

SEQ ID NO: 2034 - protein, 13 aa, synthetic construct
GQSSPHRSGQNQQ

SEQ ID NO: 2035 - protein, 13 aa, synthetic construct
GRGSPHASRQNQQ

SEQ ID NO: 2036 - protein, 13 aa, synthetic construct
GSGSPHASRKNQQ

SEQ ID NO: 2037 - protein, 13 aa, synthetic construct
GSGSPHASRQNQH

SEQ ID NO: 2038 - protein, 13 aa, synthetic construct
GSGSPHKFGKNQQ

SEQ ID NO: 2039 - protein, 13 aa, synthetic construct
GSGSPHKFGQKQQ

SEQ ID NO: 2040 - protein, 13 aa, synthetic construct
GSGSPHKFGQNQQ

SEQ ID NO: 2041 - protein, 13 aa, synthetic construct
GSGSPHKIGQNQQ

SEQ ID NO: 2042 - protein, 13 aa, synthetic construct
GSGSPHKLGQNQQ

SEQ ID NO: 2043 - protein, 13 aa, synthetic construct
GSGSPHKTSKNQQ

SEQ ID NO: 2044 - protein, 13 aa, synthetic construct
GSGSPHKTSQKQQ

SEQ ID NO: 2045 - protein, 13 aa, synthetic construct
GSGSPHKTSQNQQ

SEQ ID NO: 2046 - protein, 13 aa, synthetic construct
GSGSPHKTTQNQQ

SEQ ID NO: 2047 - protein, 13 aa, synthetic construct
GSGSPHKTYQNQQ

SEQ ID NO: 2048 - protein, 13 aa, synthetic construct
GSGSPHKYGQNQQ

SEQ ID NO: 2049 - protein, 13 aa, synthetic construct
GSGSPHSKAQHQQ

SEQ ID NO: 2050 - protein, 13 aa, synthetic construct
GSGSPHSKDQNQQ

SEQ ID NO: 2051 - protein, 13 aa, synthetic construct
GSGSPHSKPQNQQ

SEQ ID NO: 2052 - protein, 13 aa, synthetic construct
GSGSPHVRGQKQQ

SEQ ID NO: 2053 - protein, 13 aa, synthetic construct
GSGSPHVRGQNKQ

SEQ ID NO: 2054 - protein, 13 aa, synthetic construct
GSHSPHKRGQNQQ

SEQ ID NO: 2055 - protein, 13 aa, synthetic construct
GSHSPHKSGQKQQ

SEQ ID NO: 2056 - protein, 13 aa, synthetic construct
GSHSPHKSGQNQQ

SEQ ID NO: 2057 - protein, 13 aa, synthetic construct
VSGSPHASRQNQQ

SEQ ID NO: 2058 - protein, 13 aa, synthetic construct
VSGSPHGARQNQQ

SEQ ID NO: 2059 - protein, 13 aa, synthetic construct
VSGSPHKFGQNQQ

SEQ ID NO: 2060 - protein, 13 aa, synthetic construct
GSGSPHSKAQYYV

SEQ ID NO: 2061 - protein, 13 aa, synthetic construct
GSGSPHSKLRRQQ

SEQ ID NO: 2062 - protein, 13 aa, synthetic construct
GSGSPHSKAGCGQ

SEQ ID NO: 2063 - protein, 13 aa, synthetic construct
GSGSPHSRAQNQQ

SEQ ID NO: 2064 - protein, 13 aa, synthetic construct
GSGSPHSKRLRQQ

SEQ ID NO: 2065 - protein, 13 aa, synthetic construct
GSGSPHSLRRNQQ

SEQ ID NO: 2066 - protein, 13 aa, synthetic construct
GSGSPHSRGRNQQ

SEQ ID NO: 2067 - protein, 13 aa, synthetic construct
GSGSPHSSRRNQQ

SEQ ID NO: 2068 - protein, 13 aa, synthetic construct
GSGSPHSKAFRLQ

SEQ ID NO: 2069 - protein, 13 aa, synthetic construct
GSCSPHRKAQNQQ

SEQ ID NO: 2070 - protein, 13 aa, synthetic construct
GSGSPHFLRQNQQ

SEQ ID NO: 2071 - protein, 13 aa, synthetic construct
GSGSPHSLRFNQQ

SEQ ID NO: 2072 - protein, 13 aa, synthetic construct
GSGSPHSKWLLQQ

SEQ ID NO: 2073 - protein, 13 aa, synthetic construct
GSGSPHSKRRLQQ

SEQ ID NO: 2074 - protein, 13 aa, synthetic construct
GSGSPHSKAQRKL

SEQ ID NO: 2075 - protein, 13 aa, synthetic construct
GSGSPHSKALRRQ

SEQ ID NO: 2076 - protein, 13 aa, synthetic construct
GSGSPHSKAQRLR

SEQ ID NO: 2077 - protein, 13 aa, synthetic construct
GSGSPHSKAQRRL

SEQ ID NO: 2078 - protein, 13 aa, synthetic construct
GSGSPHSKARRQQ

SEQ ID NO: 2079 - protein, 13 aa, synthetic construct
GSGSPHSKARRLQ

SEQ ID NO: 2080 - protein, 13 aa, synthetic construct
GSGSPHSKSRRQQ

SEQ ID NO: 2081 - protein, 13 aa, synthetic construct
GLLSPHWKAQNQQ

SEQ ID NO: 2082 - protein, 13 aa, synthetic construct
GSGSPHSKARLRQ

SEQ ID NO: 2083 - protein, 13 aa, synthetic construct
GSGSPHSKASKRQ

SEQ ID NO: 2084 - protein, 13 aa, synthetic construct
GSGSPHVRRQNQQ

SEQ ID NO: 2085 - protein, 13 aa, synthetic construct
GSGSPHSKAQLYR

SEQ ID NO: 2086 - protein, 13 aa, synthetic construct
GSGSPHSKAQLTV

SEQ ID NO: 2087 - protein, 13 aa, synthetic construct
GHDSPHKRGQHRQ

SEQ ID NO: 2088 - protein, 13 aa, synthetic construct
GHDSPHKSGQKQQ

SEQ ID NO: 2089 - protein, 13 aa, synthetic construct
GHDSPHKSGLTQQ

SEQ ID NO: 2090 - protein, 13 aa, synthetic construct
GDDSPHKSGRNQQ

SEQ ID NO: 2091 - protein, 13 aa, synthetic construct
GHDSPHKSGLNQQ

SEQ ID NO: 2092 - protein, 13 aa, synthetic construct
GHESPHKSAQNHQ

SEQ ID NO: 2093 - protein, 13 aa, synthetic construct
GHDSPHKSAQNQW

SEQ ID NO: 2094 - protein, 13 aa, synthetic construct
GHDSPHKSGQNTH

SEQ ID NO: 2095 - protein, 13 aa, synthetic construct
GHDSPHKSGRRRQ

SEQ ID NO: 2096 - protein, 13 aa, synthetic construct
GHDSPHKSAQNQQ

SEQ ID NO: 2097 - protein, 13 aa, synthetic construct
GHDSPHKSGQYQQ

SEQ ID NO: 2098 - protein, 13 aa, synthetic construct
GNYSPHKIGQNQQ

SEQ ID NO: 2099 - protein, 13 aa, synthetic construct
GHDSPHKSRQNDQ

SEQ ID NO: 2100 - protein, 13 aa, synthetic construct
GHDSPHKSGQIRQ

SEQ ID NO: 2101 - protein, 13 aa, synthetic construct
GHDSPHKIGQNQH

SEQ ID NO: 2102 - protein, 13 aa, synthetic construct
GYDSPHKSGQKQQ

SEQ ID NO: 2103 - protein, 13 aa, synthetic construct
GHDSPHKSGQSVQ

SEQ ID NO: 2104 - protein, 13 aa, synthetic construct
GHESPHKSGRSQQ

SEQ ID NO: 2105 - protein, 13 aa, synthetic construct
GHDSPHKSGQNKL

SEQ ID NO: 2106 - protein, 13 aa, synthetic construct
GHDSPHKTGQNQQ

SEQ ID NO: 2107 - protein, 13 aa, synthetic construct
GRGSPHKRGQNQQ

SEQ ID NO: 2108 - protein, 13 aa, synthetic construct
GSGSPHTKAQNPP

SEQ ID NO: 2109 - protein, 13 aa, synthetic construct
GQDSPHKSGQHQQ

SEQ ID NO: 2110 - protein, 13 aa, synthetic construct
GHDSPHKSGQIQH

SEQ ID NO: 2111 - protein, 13 aa, synthetic construct
GHDSPHKSGPRQQ

SEQ ID NO: 2112 - protein, 13 aa, synthetic construct
GHDSPHKSGHTQQ

SEQ ID NO: 2113 - protein, 13 aa, synthetic construct
GHDSPHKSGQRQH

SEQ ID NO: 2114 - protein, 13 aa, synthetic construct
GSGSPHTKAQNQQ

SEQ ID NO: 2115 - protein, 13 aa, synthetic construct
GHDSPHKSAQSQQ

SEQ ID NO: 2116 - protein, 13 aa, synthetic construct
GHESPHKSGQNQQ

SEQ ID NO: 2117 - protein, 13 aa, synthetic construct
GHDSPHKSLQNQQ

SEQ ID NO: 2118 - protein, 13 aa, synthetic construct
GHGSPHSKAQNPQ

SEQ ID NO: 2119 - protein, 13 aa, synthetic construct
GHDSPHKSGRNQE

SEQ ID NO: 2120 - protein, 13 aa, synthetic construct
GHDSPHKSGQTQL

SEQ ID NO: 2121 - protein, 13 aa, synthetic construct
GHDSPHKSEKNQQ

SEQ ID NO: 2122 - protein, 13 aa, synthetic construct
GRDSPHKSGQDQQ

SEQ ID NO: 2123 - protein, 13 aa, synthetic construct
GHDSPHKTGHNQQ

SEQ ID NO: 2124 - protein, 13 aa, synthetic construct
GYDSPHKSGQTQQ

SEQ ID NO: 2125 - protein, 13 aa, synthetic construct
GHESPHKSGQTQQ

SEQ ID NO: 2126 - protein, 13 aa, synthetic construct
GHDSPHKSGQSKQ

SEQ ID NO: 2127 - protein, 13 aa, synthetic construct
GHDSPHKTGQNQP

SEQ ID NO: 2128 - protein, 13 aa, synthetic construct
GHDSPHKSGQSPQ

SEQ ID NO: 2129 - protein, 13 aa, synthetic construct
GNDSPHKSVQNQQ

SEQ ID NO: 2130 - protein, 13 aa, synthetic construct
GHDSPHKSAQNYQ

SEQ ID NO: 2131 - protein, 13 aa, synthetic construct
GSASPHSKALNQQ

SEQ ID NO: 2132 - protein, 13 aa, synthetic construct
GHESPHKSAQNRQ

SEQ ID NO: 2133 - protein, 13 aa, synthetic construct
GQDSPHKIGQNQQ

SEQ ID NO: 2134 - protein, 13 aa, synthetic construct
GHDSPHKSGQNHL

SEQ ID NO: 2135 - protein, 13 aa, synthetic construct
GHDSPHKSGQYQH

SEQ ID NO: 2136 - protein, 13 aa, synthetic construct
GNDSPHKSVQNHQ

SEQ ID NO: 2137 - protein, 13 aa, synthetic construct
GHDSPHKSGQNQW

SEQ ID NO: 2138 - protein, 13 aa, synthetic construct
GHDSPHKSVQNQH

SEQ ID NO: 2139 - protein, 13 aa, synthetic construct
GHDSPHKSGQNQH

SEQ ID NO: 2140 - protein, 13 aa, synthetic construct
GHDSPHKSGQTRQ

SEQ ID NO: 2141 - protein, 13 aa, synthetic construct
GHDSPHKSGQNLH

SEQ ID NO: 2142 - protein, 13 aa, synthetic construct
GHDSPHKSAQNQE

SEQ ID NO: 2143 - protein, 13 aa, synthetic construct
GHDSPHKSGQHLQ

SEQ ID NO: 2144 - protein, 13 aa, synthetic construct
GHDSPHKSRLNQP

SEQ ID NO: 2145 - protein, 13 aa, synthetic construct
GQDSPHKSGQNQD

SEQ ID NO: 2146 - protein, 13 aa, synthetic construct
GHDSPHKSGRNQQ

SEQ ID NO: 2147 - protein, 13 aa, synthetic construct
GHDSPHKSGQNLL

SEQ ID NO: 2148 - protein, 13 aa, synthetic construct
GHDSPHKSGQLVI

SEQ ID NO: 2149 - protein, 13 aa, synthetic construct
GHDSPHKSRQSQQ

SEQ ID NO: 2150 - protein, 13 aa, synthetic construct
GHDSPHKSGRTQE

SEQ ID NO: 2151 - protein, 13 aa, synthetic construct
GHDSPHKSVQTHQ

SEQ ID NO: 2152 - protein, 13 aa, synthetic construct
GHDSPHKSGQNQP

SEQ ID NO: 2153 - protein, 13 aa, synthetic construct
GHDSPHKSGQTQQ

SEQ ID NO: 2154 - protein, 13 aa, synthetic construct
GPDSPHKIGQNQQ

SEQ ID NO: 2155 - protein, 13 aa, synthetic construct
GHDSPHKSVQNQQ

SEQ ID NO: 2156 - protein, 13 aa, synthetic construct
GHDSPHKSRQDQH

SEQ ID NO: 2157 - protein, 13 aa, synthetic construct
GPDSPHKSGQKQQ

SEQ ID NO: 2158 - protein, 13 aa, synthetic construct
GHDSPHKSRQSQH

SEQ ID NO: 2159 - protein, 13 aa, synthetic construct
GHDSPHKSVQNQL

SEQ ID NO: 2160 - protein, 13 aa, synthetic construct
GYDSPHKSGQYQH

SEQ ID NO: 2161 - protein, 13 aa, synthetic construct
GHDSPHKSRQNQQ

SEQ ID NO: 2162 - protein, 13 aa, synthetic construct
GHDSPHKSWVRQQ

SEQ ID NO: 2163 - protein, 13 aa, synthetic construct
GHESPHKSGQNQH

SEQ ID NO: 2164 - protein, 13 aa, synthetic construct
GHDSPHKIGHNQQ

SEQ ID NO: 2165 - protein, 13 aa, synthetic construct
GHDSPHKSNAWQQ

SEQ ID NO: 2166 - protein, 13 aa, synthetic construct
GHDSPHKSGQSVP

SEQ ID NO: 2167 - protein, 13 aa, synthetic construct
GHESPHKSGQNIQ

SEQ ID NO: 2168 - protein, 13 aa, synthetic construct
GHDSPHKSVQNHL

SEQ ID NO: 2169 - protein, 13 aa, synthetic construct
GHDSPHKIGLDQQ

SEQ ID NO: 2170 - protein, 13 aa, synthetic construct
ASGSPHSKAQHQQ

SEQ ID NO: 2171 - protein, 13 aa, synthetic construct
GHDSPHKRGPDQQ

SEQ ID NO: 2172 - protein, 13 aa, synthetic construct
GMGSPHSKTQNQQ

SEQ ID NO: 2173 - protein, 13 aa, synthetic construct
GHDSPHKSGESQQ

SEQ ID NO: 2174 - protein, 13 aa, synthetic construct
GHDSPHKHGQNHQ

SEQ ID NO: 2175 - protein, 13 aa, synthetic construct
GTGSPHSKAQNQL

SEQ ID NO: 2176 - protein, 13 aa, synthetic construct
GHDSPHKSVQNKQ

SEQ ID NO: 2177 - protein, 13 aa, synthetic construct
GQVSPHKSGQNQQ

SEQ ID NO: 2178 - protein, 13 aa, synthetic construct
GHDSPHKSGQRQL

SEQ ID NO: 2179 - protein, 13 aa, synthetic construct
GHDSPHKIGQNQL

SEQ ID NO: 2180 - protein, 13 aa, synthetic construct
GHDSPHKSGQIIV

SEQ ID NO: 2181 - protein, 13 aa, synthetic construct
GYDSPHKSGQKQS

SEQ ID NO: 2182 - protein, 13 aa, synthetic construct
GNGSPHSKAQNQE

SEQ ID NO: 2183 - protein, 13 aa, synthetic construct
GDDSPHKSVQNQQ

SEQ ID NO: 2184 - protein, 13 aa, synthetic construct
GHDSPHKSVQSHQ

SEQ ID NO: 2185 - protein, 13 aa, synthetic construct
GHDSPHKSGQFVV

SEQ ID NO: 2186 - protein, 13 aa, synthetic construct
GHDSPHKSRQNLQ

SEQ ID NO: 2187 - protein, 13 aa, synthetic construct
GHNSPHKSGQNQE

SEQ ID NO: 2188 - protein, 13 aa, synthetic construct
GHDSPHKSGQSQP

SEQ ID NO: 2189 - protein, 13 aa, synthetic construct
GHESPHKSGQNEQ

SEQ ID NO: 2190 - protein, 13 aa, synthetic construct
GHDSPHKSGQNQL

SEQ ID NO: 2191 - protein, 13 aa, synthetic construct
GHDSPHKSAQNLL

SEQ ID NO: 2192 - protein, 13 aa, synthetic construct
ASGSPHSKAINQQ

SEQ ID NO: 2193 - protein, 13 aa, synthetic construct
GNGSPHKRGQNQQ

SEQ ID NO: 2194 - protein, 13 aa, synthetic construct
GHDSPHKSGQSLQ

SEQ ID NO: 2195 - protein, 13 aa, synthetic construct
GHDSPHKSAQNHQ

SEQ ID NO: 2196 - protein, 13 aa, synthetic construct
GHDSPHKSGRNRQ

SEQ ID NO: 2197 - protein, 13 aa, synthetic construct
GHDSPHKYGQNEQ

SEQ ID NO: 2198 - protein, 13 aa, synthetic construct
GNGSPHSKAPNLQ

SEQ ID NO: 2199 - protein, 13 aa, synthetic construct
GHDSPHKSQQNQQ

SEQ ID NO: 2200 - protein, 13 aa, synthetic construct
GHDSPHKSVQSKQ

SEQ ID NO: 2201 - protein, 13 aa, synthetic construct
GNDSPHKIGHNQQ

SEQ ID NO: 2202 - protein, 13 aa, synthetic construct
GGGSPHSKAQDQQ

SEQ ID NO: 2203 - protein, 13 aa, synthetic construct
GQDSPHKSGQNPL

SEQ ID NO: 2204 - protein, 13 aa, synthetic construct
ASGSPHSKAQNHQ

SEQ ID NO: 2205 - protein, 13 aa, synthetic construct
GHDSPHKSGRDQK

SEQ ID NO: 2206 - protein, 13 aa, synthetic construct
GHDSPHKSVHNQQ

SEQ ID NO: 2207 - protein, 13 aa, synthetic construct
GHDSPHKSGQWKR

SEQ ID NO: 2208 - protein, 13 aa, synthetic construct
GSGSPHSKAENRQ

SEQ ID NO: 2209 - protein, 13 aa, synthetic construct
GHDSPHKSGQSQQ

SEQ ID NO: 2210 - protein, 13 aa, synthetic construct
GHDSPHKSRQAQQ

SEQ ID NO: 2211 - protein, 13 aa, synthetic construct
GHDSPHKSVQNHQ

SEQ ID NO: 2212 - protein, 13 aa, synthetic construct
GHDSPHKSKQNQQ

SEQ ID NO: 2213 - protein, 13 aa, synthetic construct
GHDSPHKSAQNQL

SEQ ID NO: 2214 - protein, 13 aa, synthetic construct
GHDSPHKSGQTQP

SEQ ID NO: 2215 - protein, 13 aa, synthetic construct
GHDSPHKLWINQQ

SEQ ID NO: 2216 - protein, 13 aa, synthetic construct
GPDSPHKSGQNQQ

SEQ ID NO: 2217 - protein, 13 aa, synthetic construct
GHDSPHKSVQKQL

SEQ ID NO: 2218 - protein, 13 aa, synthetic construct
GHPSPHWKGQNQQ

SEQ ID NO: 2219 - protein, 13 aa, synthetic construct
GHDSPHKSGRNQL

SEQ ID NO: 2220 - protein, 13 aa, synthetic construct
GSGSPHSKVQDQQ

SEQ ID NO: 2221 - protein, 13 aa, synthetic construct
GHDSPHKMGRNQQ

SEQ ID NO: 2222 - protein, 13 aa, synthetic construct
GHDSPHKSGISIQ

SEQ ID NO: 2223 - protein, 13 aa, synthetic construct
GHDSPHKSVQNLQ

SEQ ID NO: 2224 - protein, 13 aa, synthetic construct
GHDSPHKMAHNQQ

SEQ ID NO: 2225 - protein, 13 aa, synthetic construct
GHDSPHKHGQNQQ

SEQ ID NO: 2226 - protein, 13 aa, synthetic construct
GHDSPHKSVQSQQ

SEQ ID NO: 2227 - protein, 13 aa, synthetic construct
GHDSPHKSGQTVC

SEQ ID NO: 2228 - protein, 13 aa, synthetic construct
GQDSPHKSGQYQQ

SEQ ID NO: 2229 - protein, 13 aa, synthetic construct
GHDSPHKSGQQIM

SEQ ID NO: 2230 - protein, 13 aa, synthetic construct
GHDSPHKSRQNEQ

SEQ ID NO: 2231 - protein, 13 aa, synthetic construct
GHDSPHKSGLNHQ

SEQ ID NO: 2232 - protein, 13 aa, synthetic construct
GYDSPHKSGQNQQ

SEQ ID NO: 2233 - protein, 13 aa, synthetic construct
GHDSPHKSGQNLQ

SEQ ID NO: 2234 - protein, 13 aa, synthetic construct
GHDSPHKSRQDQQ

SEQ ID NO: 2235 - protein, 13 aa, synthetic construct
GDDSPHKSGQKQL

SEQ ID NO: 2236 - protein, 13 aa, synthetic construct
GSGSPHSKAQNQA

SEQ ID NO: 2237 - protein, 13 aa, synthetic construct
GDDSPHKSGHNQQ

SEQ ID NO: 2238 - protein, 13 aa, synthetic construct
GHDSPHKSGQMIH

SEQ ID NO: 2239 - protein, 13 aa, synthetic construct
GHDSPHKSGRNHQ

SEQ ID NO: 2240 - protein, 13 aa, synthetic construct
GHDSPHKSVQNRQ

SEQ ID NO: 2241 - protein, 13 aa, synthetic construct
GHDSPHKSGQKMN

SEQ ID NO: 2242 - protein, 16 aa, synthetic construct
TINGSGSPHSKAQNQQ

SEQ ID NO: 2243 - protein, 16 aa, synthetic construct
TINGHDSPHKSGQNQQ

SEQ ID NO: 2244 - protein, 16 aa, synthetic construct
TIIGSGSPHSKAQNRH

SEQ ID NO: 2245 - protein, 16 aa, synthetic construct
TFPGSGSPHSKVQNQQ

SEQ ID NO: 2246 - protein, 16 aa, synthetic construct
TEKMSGSPHSKAQNQQ

SEQ ID NO: 2247 - protein, 16 aa, synthetic construct
EINGRGSPHSKAQNQQ

SEQ ID NO: 2248 - protein, 16 aa, synthetic construct
TVNRNGSPHSKAQNQQ

SEQ ID NO: 2249 - protein, 16 aa, synthetic construct
TVNGSGSPHSKARDQQ

SEQ ID NO: 2250 - protein, 16 aa, synthetic construct
TFNGSGSPHSKAPNLQ

SEQ ID NO: 2251 - protein, 16 aa, synthetic construct
TEKTSGSPHSKAQNQQ

SEQ ID NO: 2252 - protein, 16 aa, synthetic construct
TINGSGSPHSKAHVRQ

SEQ ID NO: 2253 - protein, 16 aa, synthetic construct
TVNGSGSPHSKAPNQH

SEQ ID NO: 2254 - protein, 16 aa, synthetic construct
TEKISGSPHSKAQNQQ

SEQ ID NO: 2255 - protein, 16 aa, synthetic construct
TINGPGSPHSKAHNQQ

SEQ ID NO: 2256 - protein, 16 aa, synthetic construct
TVNGSGSPHSKTQSQQ

SEQ ID NO: 2257 - protein, 16 aa, synthetic construct
SINESGSPHSKAQNQQ

SEQ ID NO: 2258 - protein, 16 aa, synthetic construct
TERTSGSPHSKAQNQQ

SEQ ID NO: 2259 - protein, 16 aa, synthetic construct
TINGSGSPHSKAQPAK

SEQ ID NO: 2260 - protein, 16 aa, synthetic construct
TEKSSGSPHSKAQNQQ

SEQ ID NO: 2261 - protein, 16 aa, synthetic construct
TSYGNGSPHSKAQNQQ

SEQ ID NO: 2262 - protein, 16 aa, synthetic construct
TEKGSGSPHSKAQNQQ

SEQ ID NO: 2263 - protein, 16 aa, synthetic construct
TINGSGSPHSKSQTQQ

SEQ ID NO: 2264 - protein, 16 aa, synthetic construct
TERISGSPHSKAQNQQ

SEQ ID NO: 2265 - protein, 16 aa, synthetic construct
TERASGSPHSKAQNQQ

SEQ ID NO: 2266 - protein, 16 aa, synthetic construct
ELHGSGSPHSKAQNQQ

SEQ ID NO: 2267 - protein, 16 aa, synthetic construct
AINGSGSPHSKAQNLA

SEQ ID NO: 2268 - protein, 16 aa, synthetic construct
TVNGSGSPHSKSQNQL

SEQ ID NO: 2269 - protein, 16 aa, synthetic construct
TERNSGSPHSKAQNQQ

SEQ ID NO: 2270 - protein, 16 aa, synthetic construct
SVNGNGSPHSKAQNQQ

SEQ ID NO: 2271 - protein, 16 aa, synthetic construct
TFNGSGSPHSKAQGQQ

SEQ ID NO: 2272 - protein, 16 aa, synthetic construct
TERVSGSPHSKAQNQQ

SEQ ID NO: 2273 - protein, 16 aa, synthetic construct
TINGSGSPHSKALNRQ

SEQ ID NO: 2274 - protein, 16 aa, synthetic construct
TERLSGSPHSKAQNQQ

SEQ ID NO: 2275 - protein, 16 aa, synthetic construct
TDNGSGSPHSKAHNQQ

SEQ ID NO: 2276 - protein, 16 aa, synthetic construct
TFHGSGSPHSKTQNQQ

SEQ ID NO: 2277 - protein, 16 aa, synthetic construct
TINGGGSPHSKAQTQQ

SEQ ID NO: 2278 - protein, 16 aa, synthetic construct
TSNGSGSPHSKAQNPP

SEQ ID NO: 2279 - protein, 16 aa, synthetic construct
TINGSGSPHSKAQNLQ

SEQ ID NO: 2280 - protein, 16 aa, synthetic construct
TVHGNGSPHSKAQNQQ

SEQ ID NO: 2281 - protein, 16 aa, synthetic construct
TINGGGSPHSKAQNQQ

SEQ ID NO: 2282 - protein, 16 aa, synthetic construct
TENMSGSPHSKAQNQQ

SEQ ID NO: 2283 - protein, 16 aa, synthetic construct
TENVSGSPHSKAQNQQ

SEQ ID NO: 2284 - protein, 16 aa, synthetic construct
TSSGSGSPHSKAQYQQ

SEQ ID NO: 2285 - protein, 16 aa, synthetic construct
TIDGGGSPHSKAQNKQ

SEQ ID NO: 2286 - protein, 16 aa, synthetic construct
TEKVSGSPHSKAQNQQ

SEQ ID NO: 2287 - protein, 16 aa, synthetic construct
AINGSGSPHSKAQDQE

SEQ ID NO: 2288 - protein, 16 aa, synthetic construct
TCNKSGSPHSKAQNQQ

SEQ ID NO: 2289 - protein, 16 aa, synthetic construct
TINGGGSPHSKAQNQL

SEQ ID NO: 2290 - protein, 16 aa, synthetic construct
NINGGGSPHSKAQNQQ

SEQ ID NO: 2291 - protein, 16 aa, synthetic construct
TEHLSGSPHSKAQNQQ

SEQ ID NO: 2292 - protein, 16 aa, synthetic construct
AEMGSGSPHSKAQNQQ

SEQ ID NO: 2293 - protein, 16 aa, synthetic construct
ATNGSGSPHSKAQNHQ

SEQ ID NO: 2294 - protein, 16 aa, synthetic construct
AIKGSGSPHSKAQDQQ

SEQ ID NO: 2295 - protein, 16 aa, synthetic construct
TINGGGSPHSKSQNQL

SEQ ID NO: 2296 - protein, 16 aa, synthetic construct
TVNGNGSPHSKAQNKQ

SEQ ID NO: 2297 - protein, 16 aa, synthetic construct
TINGSGSPHSKGHWQQ

SEQ ID NO: 2298 - protein, 16 aa, synthetic construct
TDKTSGSPHSKAQNQQ

SEQ ID NO: 2299 - protein, 16 aa, synthetic construct
TFKGSGSPHSKAPNQQ

SEQ ID NO: 2300 - protein, 16 aa, synthetic construct
TVNGSGSPHSKAQNQL

SEQ ID NO: 2301 - protein, 16 aa, synthetic construct
TINGSGSPHSKRPEQQ

SEQ ID NO: 2302 - protein, 16 aa, synthetic construct
TINGSGSPHSKAQRTM

SEQ ID NO: 2303 - protein, 16 aa, synthetic construct
TEKASGSPHSKAQNQQ

SEQ ID NO: 2304 - protein, 16 aa, synthetic construct
SDQGSGSPHSKAQNQQ

SEQ ID NO: 2305 - protein, 16 aa, synthetic construct
TEITSGSPHSKAQNQQ

SEQ ID NO: 2306 - protein, 16 aa, synthetic construct
TDKSSGSPHSKAQNQQ

SEQ ID NO: 2307 - protein, 16 aa, synthetic construct
TIDGSGSPHSKAQNQQ

SEQ ID NO: 2308 - protein, 16 aa, synthetic construct
TVNGNGSPHSKAQNQH

SEQ ID NO: 2309 - protein, 16 aa, synthetic construct
NTNGSGSPHSKAQNQQ

SEQ ID NO: 2310 - protein, 16 aa, synthetic construct
TETHSGSPHSKAQNQQ

SEQ ID NO: 2311 - protein, 16 aa, synthetic construct
TINGGGSPHSKALNQQ

SEQ ID NO: 2312 - protein, 16 aa, synthetic construct
TINGSGSPHSKALHQH

SEQ ID NO: 2313 - protein, 16 aa, synthetic construct
TINGTGSPHSKAQNHQ

SEQ ID NO: 2314 - protein, 16 aa, synthetic construct
TINGSGSPHSKAQHRI

SEQ ID NO: 2315 - protein, 16 aa, synthetic construct
TINGSGSPHSKAQYIH

SEQ ID NO: 2316 - protein, 16 aa, synthetic construct
TENISGSPHSKAQNQQ

SEQ ID NO: 2317 - protein, 16 aa, synthetic construct
TIIGGGSPHSKAHNQQ

SEQ ID NO: 2318 - protein, 16 aa, synthetic construct
TINGSGSPHSKAQKFE

SEQ ID NO: 2319 - protein, 16 aa, synthetic construct
TSNESGSPHSKAQNHQ

SEQ ID NO: 2320 - protein, 16 aa, synthetic construct
TINGSGSPHSKAQFPS

SEQ ID NO: 2321 - protein, 16 aa, synthetic construct
TERPSGSPHSKAQNQQ

SEQ ID NO: 2322 - protein, 16 aa, synthetic construct
TINGNGSPHSKAQNPL

SEQ ID NO: 2323 - protein, 16 aa, synthetic construct
SIKGNGSPHSKAQNQQ

SEQ ID NO: 2324 - protein, 16 aa, synthetic construct
TERMSGSPHSKAQNQQ

SEQ ID NO: 2325 - protein, 16 aa, synthetic construct
TERSSGSPHSKAQNQQ

SEQ ID NO: 2326 - protein, 16 aa, synthetic construct
TELHSGSPHSKAQNQQ

SEQ ID NO: 2327 - protein, 16 aa, synthetic construct
TELTSGSPHSKAQNQQ

SEQ ID NO: 2328 - protein, 16 aa, synthetic construct
TINGSGSPHSKAHNQQ

SEQ ID NO: 2329 - protein, 16 aa, synthetic construct
TINGGGSPHSKAQSQQ

SEQ ID NO: 2330 - protein, 16 aa, synthetic construct
TINGSGSPHSKAQAIK

SEQ ID NO: 2331 - protein, 16 aa, synthetic construct
TENTSGSPHSKAQNQQ

SEQ ID NO: 2332 - protein, 16 aa, synthetic construct
TIDGSGSPHSKGQNRQ

SEQ ID NO: 2333 - protein, 16 aa, synthetic construct
NINGSGSPHSKAQSQQ

SEQ ID NO: 2334 - protein, 16 aa, synthetic construct
TINGSVSPHGKAQNQL

SEQ ID NO: 2335 - protein, 16 aa, synthetic construct
TSNASGSPHSKAQNQL

SEQ ID NO: 2336 - protein, 16 aa, synthetic construct
TEARSGSPHSKAQNQQ

SEQ ID NO: 2337 - protein, 16 aa, synthetic construct
TEKNSGSPHSKAQNQQ

SEQ ID NO: 2338 - protein, 16 aa, synthetic construct
TANGSGSPHSKAQYQQ

SEQ ID NO: 2339 - protein, 16 aa, synthetic construct
TVNGSGSPHSKAQYQH

SEQ ID NO: 2340 - protein, 16 aa, synthetic construct
TINGSGSPHTKAQNPQ

SEQ ID NO: 2341 - protein, 16 aa, synthetic construct
TINGSGSPHSKGQNPP

SEQ ID NO: 2342 - protein, 16 aa, synthetic construct
TIIGSGSPHSKAQHQL

SEQ ID NO: 2343 - protein, 16 aa, synthetic construct
TINGSGSPHSKAQSPP

SEQ ID NO: 2344 - protein, 16 aa, synthetic construct
TIYGSGSPHSKAQNQQ

SEQ ID NO: 2345 - protein, 16 aa, synthetic construct
TINGSGSPHSKAQAKL

SEQ ID NO: 2346 - protein, 16 aa, synthetic construct
TDKNSGSPHSKAQNQQ

SEQ ID NO: 2347 - protein, 16 aa, synthetic construct
TINGSGSPHSKTKSQQ

SEQ ID NO: 2348 - protein, 16 aa, synthetic construct
TINGSGSPHSKAQDRP

SEQ ID NO: 2349 - protein, 16 aa, synthetic construct
TINGIGSPHSKAQNLG

SEQ ID NO: 2350 - protein, 16 aa, synthetic construct
TINGSGSPHSKAQSQQ

SEQ ID NO: 2351 - protein, 16 aa, synthetic construct
TENLSGSPHSKAQNQQ

SEQ ID NO: 2352 - protein, 16 aa, synthetic construct
TINGSGSPHSKAQAFH

SEQ ID NO: 2353 - protein, 16 aa, synthetic construct
TINGSGSPHSKAQKQQ

SEQ ID NO: 2354 - protein, 16 aa, synthetic construct
TFSGSGSPHSKAQNLQ

SEQ ID NO: 2355 - protein, 16 aa, synthetic construct
AINGSGSPHSKAQNAQ

SEQ ID NO: 2356 - protein, 16 aa, synthetic construct
TESWSGSPHSKAQNQQ

SEQ ID NO: 2357 - protein, 16 aa, synthetic construct
TTNGSGSPHSKAHNQL

SEQ ID NO: 2358 - protein, 16 aa, synthetic construct
TVNGNGSPHSKAQNHQ

SEQ ID NO: 2359 - protein, 16 aa, synthetic construct
TEDKSGSPHSKAQNQQ

SEQ ID NO: 2360 - protein, 16 aa, synthetic construct
TESASGSPHSKAQNQQ

SEQ ID NO: 2361 - protein, 16 aa, synthetic construct
TNNGSGSPHSKAQNQQ

SEQ ID NO: 2362 - protein, 16 aa, synthetic construct
TSNGGGSPHSKAQNLQ

SEQ ID NO: 2363 - protein, 16 aa, synthetic construct
TDKMSGSPHSKAQNQQ

SEQ ID NO: 2364 - protein, 16 aa, synthetic construct
EVHGSGSPHSKAQNQQ

SEQ ID NO: 2365 - protein, 16 aa, synthetic construct
TINGSGSPHSKAQKLN

SEQ ID NO: 2366 - protein, 16 aa, synthetic construct
TINGGGSPHSKSQNQH

SEQ ID NO: 2367 - protein, 16 aa, synthetic construct
TVNGGGSPHSKAQSQQ

SEQ ID NO: 2368 - protein, 16 aa, synthetic construct
TTNGSGSPHSKAQYQH

SEQ ID NO: 2369 - protein, 16 aa, synthetic construct
TISGSGSPHSKAQYQH

SEQ ID NO: 2370 - protein, 16 aa, synthetic construct
TESTSGSPHSKAQNQQ

SEQ ID NO: 2371 - protein, 16 aa, synthetic construct
TINGSGSPHSKSQNVQ

SEQ ID NO: 2372 - protein, 16 aa, synthetic construct
SINGSGSPHSKAQAQQ

SEQ ID NO: 2373 - protein, 16 aa, synthetic construct
TVNGSGSPHSKAQNLQ

SEQ ID NO: 2374 - protein, 16 aa, synthetic construct
TVRDSGSPHSKAQNQQ

SEQ ID NO: 2375 - protein, 16 aa, synthetic construct
TFNASGSPHSKAPNQQ

SEQ ID NO: 2376 - protein, 16 aa, synthetic construct
TDRMSGSPHSKAQNQQ

SEQ ID NO: 2377 - protein, 16 aa, synthetic construct
TINGSGSPHSKAQTPP

SEQ ID NO: 2378 - protein, 16 aa, synthetic construct
TIKGSGSPHSKAQNQQ

SEQ ID NO: 2379 - protein, 16 aa, synthetic construct
NHIGSGSPHSKAQNQQ

SEQ ID NO: 2380 - protein, 16 aa, synthetic construct
TINGSGSPHSKAQYQH

SEQ ID NO: 2381 - protein, 16 aa, synthetic construct
TIPIDGSPHSKAQNQQ

SEQ ID NO: 2382 - protein, 16 aa, synthetic construct
TINGSGSPHSKAQGQQ

SEQ ID NO: 2383 - protein, 16 aa, synthetic construct
TFNGSGSPHNKAQNHQ

SEQ ID NO: 2384 - protein, 16 aa, synthetic construct
ESDGSGSPHSKAQNQQ

SEQ ID NO: 2385 - protein, 16 aa, synthetic construct
TINGSGSPHSKAQPPA

SEQ ID NO: 2386 - protein, 16 aa, synthetic construct
TINGSGSPHSKAQERP

SEQ ID NO: 2387 - protein, 16 aa, synthetic construct
TIKGSGSPHSKAQDLQ

SEQ ID NO: 2388 - protein, 16 aa, synthetic construct
TDLKSGSPHSKAQNQQ

SEQ ID NO: 2389 - protein, 16 aa, synthetic construct
TINGGGSPHSKAQNPP

SEQ ID NO: 2390 - protein, 16 aa, synthetic construct
TINGSGSPHSKAQAMH

SEQ ID NO: 2391 - protein, 16 aa, synthetic construct
TVPNSGSPHSKAQNQQ

SEQ ID NO: 2392 - protein, 16 aa, synthetic construct
TVIGSGSPHSKALNQQ

SEQ ID NO: 2393 - protein, 16 aa, synthetic construct
TINGSGSPHSKAQHPS

SEQ ID NO: 2394 - protein, 16 aa, synthetic construct
TINGLGSPHSKSQNQQ

SEQ ID NO: 2395 - protein, 16 aa, synthetic construct
TINGTGSPHSKAQNQQ

SEQ ID NO: 2396 - protein, 16 aa, synthetic construct
TINGSGSPHSKAPGLQ

SEQ ID NO: 2397 - protein, 16 aa, synthetic construct
TINGSGSPHSKAQGIR

SEQ ID NO: 2398 - protein, 16 aa, synthetic construct
TESHSGSPHSKAQNQQ

SEQ ID NO: 2399 - protein, 16 aa, synthetic construct
TINGSGSPHSKAQAPA

SEQ ID NO: 2400 - protein, 16 aa, synthetic construct
TINGSGSPHSKSQSQQ

SEQ ID NO: 2401 - protein, 16 aa, synthetic construct
AEHGSGSPHSKAQNQQ

SEQ ID NO: 2402 - protein, 16 aa, synthetic construct
TEDRSGSPHSKAQNQQ

SEQ ID NO: 2403 - protein, 16 aa, synthetic construct
NCLGSGSPHSKAQNQQ

SEQ ID NO: 2404 - protein, 16 aa, synthetic construct
TDRGSGSPHSKAQNQQ

SEQ ID NO: 2405 - protein, 16 aa, synthetic construct
TINGSGSPHSKAQIPP

SEQ ID NO: 2406 - protein, 16 aa, synthetic construct
TVKGSGSPHSKAQDQQ

SEQ ID NO: 2407 - protein, 16 aa, synthetic construct
NADGSGSPHSKAQNQQ

SEQ ID NO: 2408 - protein, 16 aa, synthetic construct
TDKVSGSPHSKAQNQQ

SEQ ID NO: 2409 - protein, 16 aa, synthetic construct
TITGSGSPHSKAQTQL

SEQ ID NO: 2410 - protein, 16 aa, synthetic construct
TINGSGSPHSKAQAPS

SEQ ID NO: 2411 - protein, 16 aa, synthetic construct
NCVGSGSPHSKAQNQQ

SEQ ID NO: 2412 - protein, 16 aa, synthetic construct
TIRDAGSPHSKAQNQQ

SEQ ID NO: 2413 - protein, 16 aa, synthetic construct
TVKDSGSPHSKAQNQQ

SEQ ID NO: 2414 - protein, 16 aa, synthetic construct
NALGSGSPHSKAQNQQ

SEQ ID NO: 2415 - protein, 16 aa, synthetic construct
VINGSGSPHSKGQNQQ

SEQ ID NO: 2416 - protein, 16 aa, synthetic construct
TVNGGGSPHSKAQNQQ

SEQ ID NO: 2417 - protein, 16 aa, synthetic construct
TIQDGGSPHSKAQNQQ

SEQ ID NO: 2418 - protein, 16 aa, synthetic construct
TISGGGSPHSKAQNQQ

SEQ ID NO: 2419 - protein, 16 aa, synthetic construct
TSNASGSPHSKAHNQQ

SEQ ID NO: 2420 - protein, 16 aa, synthetic construct
TINGSGSPHSKAQNTY

SEQ ID NO: 2421 - protein, 16 aa, synthetic construct
TINGSGSPHSKSQNQH

SEQ ID NO: 2422 - protein, 16 aa, synthetic construct
TINGGGSPHSKAQDKQ

SEQ ID NO: 2423 - protein, 16 aa, synthetic construct
TEFVSGSPHSKAQNQQ

SEQ ID NO: 2424 - protein, 16 aa, synthetic construct
TVNGSGSPHSKAQNHL

SEQ ID NO: 2425 - protein, 16 aa, synthetic construct
TREISGSPHSKAQNQQ

SEQ ID NO: 2426 - protein, 16 aa, synthetic construct
TINGSGSPHSKAQIGM

SEQ ID NO: 2427 - protein, 16 aa, synthetic construct
TIDGSGSPHSKALNKQ

SEQ ID NO: 2428 - protein, 16 aa, synthetic construct
TIIGGGSPHSKAQNPQ

SEQ ID NO: 2429 - protein, 16 aa, synthetic construct
QGEGSGSPHSKAQNQQ

SEQ ID NO: 2430 - protein, 16 aa, synthetic construct
TINGTGSPHSKAPNQL

SEQ ID NO: 2431 - protein, 16 aa, synthetic construct
TVNGSGSPHSKAQLQQ

SEQ ID NO: 2432 - protein, 16 aa, synthetic construct
TFNGGGSPHSKAQYQQ

SEQ ID NO: 2433 - protein, 16 aa, synthetic construct
SINGSGSPHSKTQSQQ

SEQ ID NO: 2434 - protein, 16 aa, synthetic construct
TVNGGGSPHSKAQHQQ

SEQ ID NO: 2435 - protein, 16 aa, synthetic construct
SEKGSGSPHSKAQNQQ

SEQ ID NO: 2436 - protein, 16 aa, synthetic construct
NVNGSGSPHSKAQNQQ

SEQ ID NO: 2437 - protein, 16 aa, synthetic construct
GGEGSGSPHSKAQNQQ

SEQ ID NO: 2438 - protein, 16 aa, synthetic construct
TINGSGSPHSKAQRMS

SEQ ID NO: 2439 - protein, 16 aa, synthetic construct
TINGSGSPHSKAQGIL

SEQ ID NO: 2440 - protein, 16 aa, synthetic construct
EFVGSGSPHSKAQNQQ

SEQ ID NO: 2441 - protein, 16 aa, synthetic construct
TIIGSGSPHSKAQDRQ

SEQ ID NO: 2442 - protein, 16 aa, synthetic construct
SDKGSGSPHSKAQNQQ

SEQ ID NO: 2443 - protein, 16 aa, synthetic construct
TEQVSGSPHSKAQNQQ

SEQ ID NO: 2444 - protein, 16 aa, synthetic construct
TEHVSGSPHSKAQNQQ

SEQ ID NO: 2445 - protein, 16 aa, synthetic construct
TINGSGSPHSKARDWQ

SEQ ID NO: 2446 - protein, 16 aa, synthetic construct
TENASGSPHSKAQNQQ

SEQ ID NO: 2447 - protein, 16 aa, synthetic construct
EVQGSGSPHSKAQNQQ

SEQ ID NO: 2448 - protein, 16 aa, synthetic construct
TINGSGSPHSKAQNTH

SEQ ID NO: 2449 - protein, 16 aa, synthetic construct
TINGSGSPHSKAPNLQ

SEQ ID NO: 2450 - protein, 16 aa, synthetic construct
TINGSGSPHSKAQERS

SEQ ID NO: 2451 - protein, 16 aa, synthetic construct
TSNGSGSPHSKAQNYQ

SEQ ID NO: 2452 - protein, 16 aa, synthetic construct
TEYISGSPHSKAQNQQ

SEQ ID NO: 2453 - protein, 16 aa, synthetic construct
TINGSGSPHSKAQRTC

SEQ ID NO: 2454 - protein, 16 aa, synthetic construct
TINGSGSPHSKAQIGH

SEQ ID NO: 2455 - protein, 16 aa, synthetic construct
NCWGSGSPHSKAQNQQ

SEQ ID NO: 2456 - protein, 16 aa, synthetic construct
TINGSGSPHSKAQGAI

SEQ ID NO: 2457 - protein, 16 aa, synthetic construct
TDVNSGSPHSKAQNQQ

SEQ ID NO: 2458 - protein, 16 aa, synthetic construct
SDIGSGSPHSKAQNQQ

SEQ ID NO: 2459 - protein, 16 aa, synthetic construct
TINGSGSPHSKAQVPP

SEQ ID NO: 2460 - protein, 16 aa, synthetic construct
TINGSGSPHSKAQVQQ

SEQ ID NO: 2461 - protein, 16 aa, synthetic construct
TINGSGSPHSKALMRQ

SEQ ID NO: 2462 - protein, 16 aa, synthetic construct
TINGSGSPHSKAQYSV

SEQ ID NO: 2463 - protein, 16 aa, synthetic construct
NSIGSGSPHSKAQNQQ

SEQ ID NO: 2464 - protein, 16 aa, synthetic construct
TINGSGSPHSKVPNLQ

SEQ ID NO: 2465 - protein, 16 aa, synthetic construct
AINGSGSPHSKAQSQQ

SEQ ID NO: 2466 - protein, 16 aa, synthetic construct
TINGSGSPHSKAQAIT

SEQ ID NO: 2467 - protein, 16 aa, synthetic construct
TINGSGSPHSKAQKTL

SEQ ID NO: 2468 - protein, 16 aa, synthetic construct
TVNGSGSPHSKAQNQW

SEQ ID NO: 2469 - protein, 16 aa, synthetic construct
TINGSGSPHSKAQLHH

SEQ ID NO: 2470 - protein, 16 aa, synthetic construct
TEQTSGSPHSKAQNQQ

SEQ ID NO: 2471 - protein, 16 aa, synthetic construct
TINGSGSPHSKAQNII

SEQ ID NO: 2472 - protein, 16 aa, synthetic construct
NSLGSGSPHSKAQNQQ

SEQ ID NO: 2473 - protein, 16 aa, synthetic construct
TIPMEGSPHSKAQNQQ

SEQ ID NO: 2474 - protein, 16 aa, synthetic construct
TINGSGSPHSKAQGHH

SEQ ID NO: 2475 - protein, 16 aa, synthetic construct
TDRTSGSPHSKAQNQQ

SEQ ID NO: 2476 - protein, 16 aa, synthetic construct
TINGSGSPHSKAQSKV

SEQ ID NO: 2477 - protein, 16 aa, synthetic construct
EVVGSGSPHSKAQNQQ

SEQ ID NO: 2478 - protein, 16 aa, synthetic construct
TINGSGSPHSKAQLPS

SEQ ID NO: 2479 - protein, 16 aa, synthetic construct
TINGSGSPHSKAIGKQ

SEQ ID NO: 2480 - protein, 16 aa, synthetic construct
TEPTSGSPHSKAQNQQ

SEQ ID NO: 2481 - protein, 16 aa, synthetic construct
TVNGGGSPHSKSQNQQ

SEQ ID NO: 2482 - protein, 16 aa, synthetic construct
TINGSGSPHSKAQAIH

SEQ ID NO: 2483 - protein, 16 aa, synthetic construct
TINGSGSPHSKAQHGL

SEQ ID NO: 2484 - protein, 16 aa, synthetic construct
SELGSGSPHSKAQNQQ

SEQ ID NO: 2485 - protein, 16 aa, synthetic construct
TINGSGSPHSKAQFMC

SEQ ID NO: 2486 - protein, 16 aa, synthetic construct
TINVSGSPHSKAQGQQ

SEQ ID NO: 2487 - protein, 16 aa, synthetic construct
TINGGGSPHSKAQNQM

SEQ ID NO: 2488 - protein, 16 aa, synthetic construct
TVNGSGSPHSKAQHLQ

SEQ ID NO: 2489 - protein, 16 aa, synthetic construct
TIRENGSPHSKAQNQQ

SEQ ID NO: 2490 - protein, 16 aa, synthetic construct
TINGSGSPHSKTQNHQ

SEQ ID NO: 2491 - protein, 16 aa, synthetic construct
TINGSGSPHSKAQPAR

SEQ ID NO: 2492 - protein, 16 aa, synthetic construct
TVNGSGSPHSKAQSLQ

SEQ ID NO: 2493 - protein, 16 aa, synthetic construct
TINGSGSPHSKSQSQL

SEQ ID NO: 2494 - protein, 16 aa, synthetic construct
TINGSASPHSKAHSQQ

SEQ ID NO: 2495 - protein, 16 aa, synthetic construct
TWQNSGSPHSKAQNQQ

SEQ ID NO: 2496 - protein, 16 aa, synthetic construct
TINGSGSPHSKAQDRQ

SEQ ID NO: 2497 - protein, 16 aa, synthetic construct
TINGSGSPHSKAQMPS

SEQ ID NO: 2498 - protein, 16 aa, synthetic construct
TNNGGGSPHSKAQNLQ

SEQ ID NO: 2499 - protein, 16 aa, synthetic construct
TINGSGSPHSKAQGSL

SEQ ID NO: 2500 - protein, 16 aa, synthetic construct
TEVTSGSPHSKAQNQQ

SEQ ID NO: 2501 - protein, 16 aa, synthetic construct
SINGGGSPHSKAQYQQ

SEQ ID NO: 2502 - protein, 16 aa, synthetic construct
TVIGSGSPHSKSQNQQ

SEQ ID NO: 2503 - protein, 16 aa, synthetic construct
AVNVSGSPHSKAQNQQ

SEQ ID NO: 2504 - protein, 16 aa, synthetic construct
TVNGNGSPHSKSQNQQ

SEQ ID NO: 2505 - protein, 16 aa, synthetic construct
TDRNSGSPHSKAQNQQ

SEQ ID NO: 2506 - protein, 16 aa, synthetic construct
TINGSGSPHSKAQVPA

SEQ ID NO: 2507 - protein, 16 aa, synthetic construct
GVLGSGSPHSKAQNQQ

SEQ ID NO: 2508 - protein, 16 aa, synthetic construct
TLNGNGSPHSKAQNLQ

SEQ ID NO: 2509 - protein, 16 aa, synthetic construct
AINGSGSPHSKAQDKQ

SEQ ID NO: 2510 - protein, 16 aa, synthetic construct
TSNGSGSPHSKAHYQQ

SEQ ID NO: 2511 - protein, 16 aa, synthetic construct
TINGSGSPHSKAQVPS

SEQ ID NO: 2512 - protein, 16 aa, synthetic construct
TELRSGSPHSKAQNQQ

SEQ ID NO: 2513 - protein, 16 aa, synthetic construct
NINGSGSPHSKAQNHQ

SEQ ID NO: 2514 - protein, 16 aa, synthetic construct
TVNGGGSPHSKAQNHQ

SEQ ID NO: 2515 - protein, 16 aa, synthetic construct
TINGSGSPHSKARGEQ

SEQ ID NO: 2516 - protein, 16 aa, synthetic construct
TINGGGSPHSKAQYQH

SEQ ID NO: 2517 - protein, 16 aa, synthetic construct
TEDLSGSPHSKAQNQQ

SEQ ID NO: 2518 - protein, 16 aa, synthetic construct
TINGSGSPHSKAPGQQ

SEQ ID NO: 2519 - protein, 16 aa, synthetic construct
TIPKNGSPHSKAQNQQ

SEQ ID NO: 2520 - protein, 16 aa, synthetic construct
TINGSGSPHSKAQSLQ

SEQ ID NO: 2521 - protein, 16 aa, synthetic construct
TINGSGSPHSKRLEQQ

SEQ ID NO: 2522 - protein, 16 aa, synthetic construct
TERGSGSPHSKAQNQQ

SEQ ID NO: 2523 - protein, 16 aa, synthetic construct
TVNGSGSPHSKAPNQQ

SEQ ID NO: 2524 - protein, 16 aa, synthetic construct
TSNGSGSPHSKAQNQS

SEQ ID NO: 2525 - protein, 16 aa, synthetic construct
TINGSGSPHSKAQKVI

SEQ ID NO: 2526 - protein, 16 aa, synthetic construct
TEGISGSPHSKAQNQQ

SEQ ID NO: 2527 - protein, 16 aa, synthetic construct
TINGSGSPHSKAQNND

SEQ ID NO: 2528 - protein, 16 aa, synthetic construct
TINGSGSPHSKAQSVH

SEQ ID NO: 2529 - protein, 16 aa, synthetic construct
TINGSGSPHSKAQPLG

SEQ ID NO: 2530 - protein, 16 aa, synthetic construct
TINKEGSPHSKAQNQQ

SEQ ID NO: 2531 - protein, 16 aa, synthetic construct
TCNASGSPHSKAQNQQ

SEQ ID NO: 2532 - protein, 16 aa, synthetic construct
AINGSGSPHSKAHNQE

SEQ ID NO: 2533 - protein, 16 aa, synthetic construct
TEGLSGSPHSKAQNQQ

SEQ ID NO: 2534 - protein, 16 aa, synthetic construct
TRDASGSPHSKAQNQQ

SEQ ID NO: 2535 - protein, 16 aa, synthetic construct
TSNGSGSPHSKAQNLQ

SEQ ID NO: 2536 - protein, 16 aa, synthetic construct
TGNGSGSPHSKAQIQQ

SEQ ID NO: 2537 - protein, 16 aa, synthetic construct
TVNGGGSPHSKAQNLQ

SEQ ID NO: 2538 - protein, 16 aa, synthetic construct
TDRSSGSPHSKAQNQQ

SEQ ID NO: 2539 - protein, 16 aa, synthetic construct
TINGSGSPHSKAQVRN

SEQ ID NO: 2540 - protein, 16 aa, synthetic construct
TINGSGSPHSKAPSNQ

SEQ ID NO: 2541 - protein, 16 aa, synthetic construct
TINGSGSPHSKAQVGH

SEQ ID NO: 2542 - protein, 16 aa, synthetic construct
NAIGSGSPHSKAQNQQ

SEQ ID NO: 2543 - protein, 16 aa, synthetic construct
AENGSGSPHSKAQNQQ

SEQ ID NO: 2544 - protein, 16 aa, synthetic construct
TINGSGSPHSKAQRDI

SEQ ID NO: 2545 - protein, 16 aa, synthetic construct
TINGSGSPHSKAQMPN

SEQ ID NO: 2546 - protein, 16 aa, synthetic construct
TVNGSGSPHSKSQNQQ

SEQ ID NO: 2547 - protein, 16 aa, synthetic construct
TIPAIGSPHSKAQNQQ

SEQ ID NO: 2548 - protein, 16 aa, synthetic construct
TINGSGSPHSKARGLQ

SEQ ID NO: 2549 - protein, 16 aa, synthetic construct
TELGSGSPHSKAQNQQ

SEQ ID NO: 2550 - protein, 16 aa, synthetic construct
AETGSGSPHSKAQNQQ

SEQ ID NO: 2551 - protein, 16 aa, synthetic construct
TINGSGSPHSKLQKQQ

SEQ ID NO: 2552 - protein, 16 aa, synthetic construct
TINGSGSPHSKAPSLQ

SEQ ID NO: 2553 - protein, 16 aa, synthetic construct
TINGSGSPHSKAQRDQ

SEQ ID NO: 2554 - protein, 16 aa, synthetic construct
TDVGSGSPHSKAQNQQ

SEQ ID NO: 2555 - protein, 16 aa, synthetic construct
TINGSGSPHSKNRDQQ

SEQ ID NO: 2556 - protein, 16 aa, synthetic construct
SINGSGSPHSKAPNLQ

SEQ ID NO: 2557 - protein, 16 aa, synthetic construct
TINGSGSPHSKAQAKG

SEQ ID NO: 2558 - protein, 16 aa, synthetic construct
TVNGSGSPHSKAQDKQ

SEQ ID NO: 2559 - protein, 16 aa, synthetic construct
TINGGGSPHSKAQNPQ

SEQ ID NO: 2560 - protein, 16 aa, synthetic construct
TINGSGSPHSKAQSAH

SEQ ID NO: 2561 - protein, 16 aa, synthetic construct
TINGNGSPHSKSQNQH

SEQ ID NO: 2562 - protein, 16 aa, synthetic construct
TVPTSGSPHSKAQNQQ

SEQ ID NO: 2563 - protein, 16 aa, synthetic construct
TIDGSGSPHSKSQNHQ

SEQ ID NO: 2564 - protein, 16 aa, synthetic construct
TDVKSGSPHSKAQNQQ

SEQ ID NO: 2565 - protein, 16 aa, synthetic construct
AINRSGSPHSKAQDQQ

SEQ ID NO: 2566 - protein, 16 aa, synthetic construct
TINGSGSPHSKAQSTM

SEQ ID NO: 2567 - protein, 16 aa, synthetic construct
TVNASGSPHSKAQNQL

SEQ ID NO: 2568 - protein, 16 aa, synthetic construct
TINGSGSPHSKAQREM

SEQ ID NO: 2569 - protein, 16 aa, synthetic construct
TVHGSGSPHSKAQSQQ

SEQ ID NO: 2570 - protein, 16 aa, synthetic construct
TINGGGSPHSKSQNRQ

SEQ ID NO: 2571 - protein, 16 aa, synthetic construct
TINGSGSPHSKAQYRA

SEQ ID NO: 2572 - protein, 16 aa, synthetic construct
TINGGGSPHSKAQRQQ

SEQ ID NO: 2573 - protein, 16 aa, synthetic construct
TEPMSGSPHSKAQNQQ

SEQ ID NO: 2574 - protein, 16 aa, synthetic construct
TINGSGSPHSKNQWQQ

SEQ ID NO: 2575 - protein, 16 aa, synthetic construct
ETAGSGSPHSKAQNQQ

SEQ ID NO: 2576 - protein, 16 aa, synthetic construct
TINGSGSPHSKAQRMN

SEQ ID NO: 2577 - protein, 16 aa, synthetic construct
NNLGSGSPHSKAQNQQ

SEQ ID NO: 2578 - protein, 16 aa, synthetic construct
TINGSGSPHAKAQNHQ

SEQ ID NO: 2579 - protein, 16 aa, synthetic construct
TIIKNGSPHSKAQNQQ

SEQ ID NO: 2580 - protein, 16 aa, synthetic construct
TINGSGSPHSKAGDSQ

SEQ ID NO: 2581 - protein, 16 aa, synthetic construct
TINGSGSPHSKLKSQQ

SEQ ID NO: 2582 - protein, 16 aa, synthetic construct
TINGSGSPHSKAQKIS

SEQ ID NO: 2583 - protein, 16 aa, synthetic construct
TEYNSGSPHSKAQNQQ

SEQ ID NO: 2584 - protein, 16 aa, synthetic construct
TINGSGSPHSKAPSMQ

SEQ ID NO: 2585 - protein, 16 aa, synthetic construct
AINGSGSPHSKAQNQQ

SEQ ID NO: 2586 - protein, 16 aa, synthetic construct
TINGSGSPHSKASPRQ

SEQ ID NO: 2587 - protein, 16 aa, synthetic construct
TINGSGSPHSKRMEQQ

SEQ ID NO: 2588 - protein, 16 aa, synthetic construct
TINGSGSPHSKAQYQN

SEQ ID NO: 2589 - protein, 16 aa, synthetic construct
TINGSGSPHSKAQYYV

SEQ ID NO: 2590 - protein, 16 aa, synthetic construct
TINGSGSPHSKLRRQQ

SEQ ID NO: 2591 - protein, 16 aa, synthetic construct
TINGSGSPHSKAGCGQ

SEQ ID NO: 2592 - protein, 16 aa, synthetic construct
SMNGSGSPHSRAQNQQ

SEQ ID NO: 2593 - protein, 16 aa, synthetic construct
TINGSGSPHSKRLRQQ

SEQ ID NO: 2594 - protein, 16 aa, synthetic construct
TINGSGSPHSLRRNQQ

SEQ ID NO: 2595 - protein, 16 aa, synthetic construct
TINGSGSPHSRGRNQQ

SEQ ID NO: 2596 - protein, 16 aa, synthetic construct
TINGSGSPHSSRRNQQ

SEQ ID NO: 2597 - protein, 16 aa, synthetic construct
TINGSGSPHSKAFRLQ

SEQ ID NO: 2598 - protein, 16 aa, synthetic construct
TINGSCSPHRKAQNQQ

SEQ ID NO: 2599 - protein, 16 aa, synthetic construct
TINGSGSPHFLRQNQQ

SEQ ID NO: 2600 - protein, 16 aa, synthetic construct
TINGSGSPHSLRFNQQ

SEQ ID NO: 2601 - protein, 16 aa, synthetic construct
TINGSGSPHSKWLLQQ

SEQ ID NO: 2602 - protein, 16 aa, synthetic construct
TINGSGSPHSKRRLQQ

SEQ ID NO: 2603 - protein, 16 aa, synthetic construct
TINGSGSPHSKAQRKL

SEQ ID NO: 2604 - protein, 16 aa, synthetic construct
TINGSGSPHSKALRRQ

SEQ ID NO: 2605 - protein, 16 aa, synthetic construct
TINGSGSPHSKAQRLR

SEQ ID NO: 2606 - protein, 16 aa, synthetic construct
YLSGSGSPHSKAQNQQ

SEQ ID NO: 2607 - protein, 16 aa, synthetic construct
TINGSGSPHSKAQRRL

SEQ ID NO: 2608 - protein, 16 aa, synthetic construct
TINGSGSPHSKARRQQ

SEQ ID NO: 2609 - protein, 16 aa, synthetic construct
TINGSGSPHSKARRLQ

SEQ ID NO: 2610 - protein, 16 aa, synthetic construct
TINGSGSPHSKSRRQQ

SEQ ID NO: 2611 - protein, 16 aa, synthetic construct
TINGLLSPHWKAQNQQ

SEQ ID NO: 2612 - protein, 16 aa, synthetic construct
TINGSGSPHSKARLRQ

SEQ ID NO: 2613 - protein, 16 aa, synthetic construct
TINGSGSPHSKASKRQ

SEQ ID NO: 2614 - protein, 16 aa, synthetic construct
TINGSGSPHVRRQNQQ

SEQ ID NO: 2615 - protein, 16 aa, synthetic construct
TINGSGSPHSKAQLYR

SEQ ID NO: 2616 - protein, 16 aa, synthetic construct
GLSGSGSPHSKAQNQQ

SEQ ID NO: 2617 - protein, 16 aa, synthetic construct
TINGSGSPHSKAQLTV

SEQ ID NO: 2618 - protein, 16 aa, synthetic construct
TINGHDSPHKRGQHRQ

SEQ ID NO: 2619 - protein, 16 aa, synthetic construct
MPEGHDSPHKSGQNQQ

SEQ ID NO: 2620 - protein, 16 aa, synthetic construct
MEGGHDSPHKSGQNQQ

SEQ ID NO: 2621 - protein, 16 aa, synthetic construct
MEYGHDSPHKSGQNQQ

SEQ ID NO: 2622 - protein, 16 aa, synthetic construct
AEWGHDSPHKSGQNQQ

SEQ ID NO: 2623 - protein, 16 aa, synthetic construct
CEWGHDSPHKSGQNQQ

SEQ ID NO: 2624 - protein, 16 aa, synthetic construct
ANNGQDSPHKSGQNQQ

SEQ ID NO: 2625 - protein, 16 aa, synthetic construct
IPEGHDSPHKSGQNQQ

SEQ ID NO: 2626 - protein, 16 aa, synthetic construct
ADMGHDSPHKSGQNQQ

SEQ ID NO: 2627 - protein, 16 aa, synthetic construct
IEYGHDSPHKSGQNQQ

SEQ ID NO: 2628 - protein, 16 aa, synthetic construct
ADYGHDSPHKSGQNQQ

SEQ ID NO: 2629 - protein, 16 aa, synthetic construct
IETGHDSPHKSGQNQQ

SEQ ID NO: 2630 - protein, 16 aa, synthetic construct
MEWGHDSPHKSGQNQQ

SEQ ID NO: 2631 - protein, 16 aa, synthetic construct
CEYGHDSPHKSGQNQQ

SEQ ID NO: 2632 - protein, 16 aa, synthetic construct
RINGHDSPHKSGQKQQ

SEQ ID NO: 2633 - protein, 16 aa, synthetic construct
MEIGHDSPHKSGQNQQ

SEQ ID NO: 2634 - protein, 16 aa, synthetic construct
LEYGHDSPHKSGQNQQ

SEQ ID NO: 2635 - protein, 16 aa, synthetic construct
ADWGHDSPHKSGQNQQ

SEQ ID NO: 2636 - protein, 16 aa, synthetic construct
IEIGHDSPHKSGQNQQ

SEQ ID NO: 2637 - protein, 16 aa, synthetic construct
DIMGHDSPHKSGQNQQ

SEQ ID NO: 2638 - protein, 16 aa, synthetic construct
FEQGHDSPHKSGQNQQ

SEQ ID NO: 2639 - protein, 16 aa, synthetic construct
MEFGHDSPHKSGQNQQ

SEQ ID NO: 2640 - protein, 16 aa, synthetic construct
CDQGHDSPHKSGQNQQ

SEQ ID NO: 2641 - protein, 16 aa, synthetic construct
LPEGHDSPHKSGQNQQ

SEQ ID NO: 2642 - protein, 16 aa, synthetic construct
IENGHDSPHKSGQNQQ

SEQ ID NO: 2643 - protein, 16 aa, synthetic construct
MESGHDSPHKSGQNQQ

SEQ ID NO: 2644 - protein, 16 aa, synthetic construct
AEIGHDSPHKSGQNQQ

SEQ ID NO: 2645 - protein, 16 aa, synthetic construct
VEYGHDSPHKSGQNQQ

SEQ ID NO: 2646 - protein, 16 aa, synthetic construct
IINGHDSPHKSGLTQQ

SEQ ID NO: 2647 - protein, 16 aa, synthetic construct
TSNGDDSPHKSGRNQQ

SEQ ID NO: 2648 - protein, 16 aa, synthetic construct
IEVGHDSPHKSGQNQQ

SEQ ID NO: 2649 - protein, 16 aa, synthetic construct
MEMGHDSPHKSGQNQQ

SEQ ID NO: 2650 - protein, 16 aa, synthetic construct
AEVGHDSPHKSGQNQQ

SEQ ID NO: 2651 - protein, 16 aa, synthetic construct
MDAGHDSPHKSGQNQQ

SEQ ID NO: 2652 - protein, 16 aa, synthetic construct
VEWGHDSPHKSGQNQQ

SEQ ID NO: 2653 - protein, 16 aa, synthetic construct
AEQGHDSPHKSGQNQQ

SEQ ID NO: 2654 - protein, 16 aa, synthetic construct
LEWGHDSPHKSGQNQQ

SEQ ID NO: 2655 - protein, 16 aa, synthetic construct
MELGHDSPHKSGQNQQ

SEQ ID NO: 2656 - protein, 16 aa, synthetic construct
METGHDSPHKSGQNQQ

SEQ ID NO: 2657 - protein, 16 aa, synthetic construct
MEAGHDSPHKSGQNQQ

SEQ ID NO: 2658 - protein, 16 aa, synthetic construct
IESGHDSPHKSGQNQQ

SEQ ID NO: 2659 - protein, 16 aa, synthetic construct
MEVGHDSPHKSGQNQQ

SEQ ID NO: 2660 - protein, 16 aa, synthetic construct
CEIGHDSPHKSGQNQQ

SEQ ID NO: 2661 - protein, 16 aa, synthetic construct
ATNGHDSPHKSGLNQQ

SEQ ID NO: 2662 - protein, 16 aa, synthetic construct
MDGGHDSPHKSGQNQQ

SEQ ID NO: 2663 - protein, 16 aa, synthetic construct
QEVGHDSPHKSGQNQQ

SEQ ID NO: 2664 - protein, 16 aa, synthetic construct
ADQGHDSPHKSGQNQQ

SEQ ID NO: 2665 - protein, 16 aa, synthetic construct
TINGHESPHKSAQNHQ

SEQ ID NO: 2666 - protein, 16 aa, synthetic construct
TINGHDSPHKSAQNQW

SEQ ID NO: 2667 - protein, 16 aa, synthetic construct
NMNGHDSPHKSGQNTH

SEQ ID NO: 2668 - protein, 16 aa, synthetic construct
IEMGHDSPHKSGQNQQ

SEQ ID NO: 2669 - protein, 16 aa, synthetic construct
TINGHDSPHKSGRRRQ

SEQ ID NO: 2670 - protein, 16 aa, synthetic construct
ISNGHDSPHKSAQNQQ

SEQ ID NO: 2671 - protein, 16 aa, synthetic construct
TGNGHDSPHKSGQYQQ

SEQ ID NO: 2672 - protein, 16 aa, synthetic construct
TINGNYSPHKIGQNQQ

SEQ ID NO: 2673 - protein, 16 aa, synthetic construct
TINGHDSPHKSRQNDQ

SEQ ID NO: 2674 - protein, 16 aa, synthetic construct
QQQGHDSPHKSGQNQQ

SEQ ID NO: 2675 - protein, 16 aa, synthetic construct
HDWGHDSPHKSGQNQQ

SEQ ID NO: 2676 - protein, 16 aa, synthetic construct
IEGGHDSPHKSGQNQQ

SEQ ID NO: 2677 - protein, 16 aa, synthetic construct
TFNRSGSPHSKAQNQQ

SEQ ID NO: 2678 - protein, 16 aa, synthetic construct
AINGHDSPHKSGQIRQ

SEQ ID NO: 2679 - protein, 16 aa, synthetic construct
TINGHDSPHKIGQNQH

SEQ ID NO: 2680 - protein, 16 aa, synthetic construct
AINGYDSPHKSGQKQQ

SEQ ID NO: 2681 - protein, 16 aa, synthetic construct
TESGHDSPHKSGQNQQ

SEQ ID NO: 2682 - protein, 16 aa, synthetic construct
TINGHDSPHKSGQSVQ

SEQ ID NO: 2683 - protein, 16 aa, synthetic construct
TINGHESPHKSGRSQQ

SEQ ID NO: 2684 - protein, 16 aa, synthetic construct
TINGHDSPHKSGQNKL

SEQ ID NO: 2685 - protein, 16 aa, synthetic construct
TINGHDSPHKTGQNQQ

SEQ ID NO: 2686 - protein, 16 aa, synthetic construct
TINGRGSPHKRGQNQQ

SEQ ID NO: 2687 - protein, 16 aa, synthetic construct
TINGSGSPHTKAQNPP

SEQ ID NO: 2688 - protein, 16 aa, synthetic construct
TINGQDSPHKSGQHQQ

SEQ ID NO: 2689 - protein, 16 aa, synthetic construct
SINGHDSPHKSGQIQH

SEQ ID NO: 2690 - protein, 16 aa, synthetic construct
AINGHDSPHKSGPRQQ

SEQ ID NO: 2691 - protein, 16 aa, synthetic construct
TVNGHDSPHKSGHTQQ

SEQ ID NO: 2692 - protein, 16 aa, synthetic construct
SINGHDSPHKSGQRQH

SEQ ID NO: 2693 - protein, 16 aa, synthetic construct
SLNGSGSPHTKAQNQQ

SEQ ID NO: 2694 - protein, 16 aa, synthetic construct
AINGHDSPHKSAQSQQ

SEQ ID NO: 2695 - protein, 16 aa, synthetic construct
SIYGHESPHKSGQNQQ

SEQ ID NO: 2696 - protein, 16 aa, synthetic construct
TVNGHDSPHKSLQNQQ

SEQ ID NO: 2697 - protein, 16 aa, synthetic construct
TINGHGSPHSKAQNPQ

SEQ ID NO: 2698 - protein, 16 aa, synthetic construct
TSNGYDSPHKSGQKQQ

SEQ ID NO: 2699 - protein, 16 aa, synthetic construct
TVNGHDSPHKSGRNQE

SEQ ID NO: 2700 - protein, 16 aa, synthetic construct
TTNGHDSPHKSGQTQL

SEQ ID NO: 2701 - protein, 16 aa, synthetic construct
AINGHDSPHKSEKNQQ

SEQ ID NO: 2702 - protein, 16 aa, synthetic construct
IINGRDSPHKSGQDQQ

SEQ ID NO: 2703 - protein, 16 aa, synthetic construct
TISGHDSPHKTGHNQQ

SEQ ID NO: 2704 - protein, 16 aa, synthetic construct
SINGYDSPHKSGQTQQ

SEQ ID NO: 2705 - protein, 16 aa, synthetic construct
TINGHESPHKSGQTQQ

SEQ ID NO: 2706 - protein, 16 aa, synthetic construct
TINGHDSPHKSGQSKQ

SEQ ID NO: 2707 - protein, 16 aa, synthetic construct
AIIGHESPHKSGQNQQ

SEQ ID NO: 2708 - protein, 16 aa, synthetic construct
TINGHDSPHKTGQNQP

SEQ ID NO: 2709 - protein, 16 aa, synthetic construct
AINGHDSPHKSGQSPQ

SEQ ID NO: 2710 - protein, 16 aa, synthetic construct
TIKGNDSPHKSVQNQQ

SEQ ID NO: 2711 - protein, 16 aa, synthetic construct
TEFGHDSPHKSGQNQQ

SEQ ID NO: 2712 - protein, 16 aa, synthetic construct
TINGHDSPHKSAQNYQ

SEQ ID NO: 2713 - protein, 16 aa, synthetic construct
TFNGSASPHSKALNQQ

SEQ ID NO: 2714 - protein, 16 aa, synthetic construct
TINGHESPHKSAQNRQ

SEQ ID NO: 2715 - protein, 16 aa, synthetic construct
TTNGHDSPHKSGQNQQ

SEQ ID NO: 2716 - protein, 16 aa, synthetic construct
TIKGQDSPHKIGQNQQ

SEQ ID NO: 2717 - protein, 16 aa, synthetic construct
TVNGHDSPHKSGQNHL

SEQ ID NO: 2718 - protein, 16 aa, synthetic construct
SINGHDSPHKSGQYQH

SEQ ID NO: 2719 - protein, 16 aa, synthetic construct
TINGNDSPHKSVQNHQ

SEQ ID NO: 2720 - protein, 16 aa, synthetic construct
TITGHDSPHKSGQNQW

SEQ ID NO: 2721 - protein, 16 aa, synthetic construct
TNNGHDSPHKSVQNQH

SEQ ID NO: 2722 - protein, 16 aa, synthetic construct
TIDGHDSPHKSGQNQH

SEQ ID NO: 2723 - protein, 16 aa, synthetic construct
TVNGHDSPHKSGQTRQ

SEQ ID NO: 2724 - protein, 16 aa, synthetic construct
TVNGHDSPHKSGQNLH

SEQ ID NO: 2725 - protein, 16 aa, synthetic construct
AISGHDSPHKSGLNQQ

SEQ ID NO: 2726 - protein, 16 aa, synthetic construct
AINGHDSPHKSAQNQE

SEQ ID NO: 2727 - protein, 16 aa, synthetic construct
TITGHDSPHKSGQHLQ

SEQ ID NO: 2728 - protein, 16 aa, synthetic construct
TINGHDSPHKSRLNQP

SEQ ID NO: 2729 - protein, 16 aa, synthetic construct
TVDGHDSPHKSGQKQQ

SEQ ID NO: 2730 - protein, 16 aa, synthetic construct
TINGQDSPHKSGQNQD

SEQ ID NO: 2731 - protein, 16 aa, synthetic construct
TIEGHDSPHKSGRNQQ

SEQ ID NO: 2732 - protein, 16 aa, synthetic construct
TTNGHDSPHKSGQNLL

SEQ ID NO: 2733 - protein, 16 aa, synthetic construct
TINGHDSPHKSGQLVI

SEQ ID NO: 2734 - protein, 16 aa, synthetic construct
TVNGHDSPHKSRQSQQ

SEQ ID NO: 2735 - protein, 16 aa, synthetic construct
TINGHDSPHKSGRTQE

SEQ ID NO: 2736 - protein, 16 aa, synthetic construct
TINGHDSPHKSVQTHQ

SEQ ID NO: 2737 - protein, 16 aa, synthetic construct
TSNGHDSPHKSGQNQP

SEQ ID NO: 2738 - protein, 16 aa, synthetic construct
VINGHDSPHKSGQTQQ

SEQ ID NO: 2739 - protein, 16 aa, synthetic construct
TINGPDSPHKIGQNQQ

SEQ ID NO: 2740 - protein, 16 aa, synthetic construct
AVNGHDSPHKSVQNQQ

SEQ ID NO: 2741 - protein, 16 aa, synthetic construct
TINGHDSPHKSRQDQH

SEQ ID NO: 2742 - protein, 16 aa, synthetic construct
AINGPDSPHKSGQKQQ

SEQ ID NO: 2743 - protein, 16 aa, synthetic construct
TINGHDSPHKSRQSQH

SEQ ID NO: 2744 - protein, 16 aa, synthetic construct
TIYGHDSPHKSVQNQL

SEQ ID NO: 2745 - protein, 16 aa, synthetic construct
TVNGHDSPHKSGQNLL

SEQ ID NO: 2746 - protein, 16 aa, synthetic construct
TENKSGSPHSKAQNQQ

SEQ ID NO: 2747 - protein, 16 aa, synthetic construct
TTNGQDSPHKSGQNQQ

SEQ ID NO: 2748 - protein, 16 aa, synthetic construct
TDKGSGSPHSKAQNQQ

SEQ ID NO: 2749 - protein, 16 aa, synthetic construct
TIDGHDSPHKSGRNQQ

SEQ ID NO: 2750 - protein, 16 aa, synthetic construct
TINGYDSPHKSGQYQH

SEQ ID NO: 2751 - protein, 16 aa, synthetic construct
TDNGHDSPHKSRQNQQ

SEQ ID NO: 2752 - protein, 16 aa, synthetic construct
TINGHDSPHKSWVRQQ

SEQ ID NO: 2753 - protein, 16 aa, synthetic construct
TINGHESPHKSGQNQH

SEQ ID NO: 2754 - protein, 16 aa, synthetic construct
TVNGHDSPHKIGHNQQ

SEQ ID NO: 2755 - protein, 16 aa, synthetic construct
TCNGHDSPHKSGRNQQ

SEQ ID NO: 2756 - protein, 16 aa, synthetic construct
TINGNGSPHSKAQNHQ

SEQ ID NO: 2757 - protein, 16 aa, synthetic construct
NVVGHDSPHKSGQNQQ

SEQ ID NO: 2758 - protein, 16 aa, synthetic construct
TINGHDSPHKSNAWQQ

SEQ ID NO: 2759 - protein, 16 aa, synthetic construct
TDAGHDSPHKSGQNQQ

SEQ ID NO: 2760 - protein, 16 aa, synthetic construct
TEVGHDSPHKSGQNQQ

SEQ ID NO: 2761 - protein, 16 aa, synthetic construct
SELGHDSPHKSGQNQQ

SEQ ID NO: 2762 - protein, 16 aa, synthetic construct
TINGHDSPHKSGQSVP

SEQ ID NO: 2763 - protein, 16 aa, synthetic construct
TINGHESPHKSGQNIQ

SEQ ID NO: 2764 - protein, 16 aa, synthetic construct
TINGHDSPHKSVQNHL

SEQ ID NO: 2765 - protein, 16 aa, synthetic construct
TINGHDSPHKIGLDQQ

SEQ ID NO: 2766 - protein, 16 aa, synthetic construct
TSNASGSPHSKAQHQQ

SEQ ID NO: 2767 - protein, 16 aa, synthetic construct
TINGHDSPHKRGPDQQ

SEQ ID NO: 2768 - protein, 16 aa, synthetic construct
TINGMGSPHSKTQNQQ

SEQ ID NO: 2769 - protein, 16 aa, synthetic construct
TIKGHDSPHKSGESQQ

SEQ ID NO: 2770 - protein, 16 aa, synthetic construct
TINGHDSPHKHGQNHQ

SEQ ID NO: 2771 - protein, 16 aa, synthetic construct
TVNGTGSPHSKAQNQL

SEQ ID NO: 2772 - protein, 16 aa, synthetic construct
TIIGHDSPHKSGQYQH

SEQ ID NO: 2773 - protein, 16 aa, synthetic construct
TSNGHDSPHKSVQNKQ

SEQ ID NO: 2774 - protein, 16 aa, synthetic construct
IVNGQVSPHKSGQNQQ

SEQ ID NO: 2775 - protein, 16 aa, synthetic construct
TVNGHDSPHKSGQRQL

SEQ ID NO: 2776 - protein, 16 aa, synthetic construct
TVNGHDSPHKIGQNQL

SEQ ID NO: 2777 - protein, 16 aa, synthetic construct
TINGHDSPHKSGQIIV

SEQ ID NO: 2778 - protein, 16 aa, synthetic construct
IGNGHESPHKSGQNQQ

SEQ ID NO: 2779 - protein, 16 aa, synthetic construct
EVMGHDSPHKSGQNQQ

SEQ ID NO: 2780 - protein, 16 aa, synthetic construct
TINGYDSPHKSGQKQS

SEQ ID NO: 2781 - protein, 16 aa, synthetic construct
TIHGNGSPHSKAQNQE

SEQ ID NO: 2782 - protein, 16 aa, synthetic construct
YQVGHDSPHKSGQNQQ

SEQ ID NO: 2783 - protein, 16 aa, synthetic construct
TIKGDDSPHKSVQNQQ

SEQ ID NO: 2784 - protein, 16 aa, synthetic construct
TINGHDSPHKSVQSHQ

SEQ ID NO: 2785 - protein, 16 aa, synthetic construct
TINGHDSPHKSGQFVV

SEQ ID NO: 2786 - protein, 16 aa, synthetic construct
TVNGHDSPHKSRQNLQ

SEQ ID NO: 2787 - protein, 16 aa, synthetic construct
ATNGHNSPHKSGQNQE

SEQ ID NO: 2788 - protein, 16 aa, synthetic construct
AINGHDSPHKSAQNQQ

SEQ ID NO: 2789 - protein, 16 aa, synthetic construct
TEHGHDSPHKSGQNQQ

SEQ ID NO: 2790 - protein, 16 aa, synthetic construct
TIYGHDSPHKSGQSQP

SEQ ID NO: 2791 - protein, 16 aa, synthetic construct
TISGHESPHKSGQNEQ

SEQ ID NO: 2792 - protein, 16 aa, synthetic construct
AIIGHDSPHKSAQNQQ

SEQ ID NO: 2793 - protein, 16 aa, synthetic construct
AIDGHDSPHKSGQNQL

SEQ ID NO: 2794 - protein, 16 aa, synthetic construct
TIMGHDSPHKSVQNQQ

SEQ ID NO: 2795 - protein, 16 aa, synthetic construct
EVGGHDSPHKSGQNQQ

SEQ ID NO: 2796 - protein, 16 aa, synthetic construct
TINGHDSPHKSAQNLL

SEQ ID NO: 2797 - protein, 16 aa, synthetic construct
TINASGSPHSKAINQQ

SEQ ID NO: 2798 - protein, 16 aa, synthetic construct
AINGNGSPHKRGQNQQ

SEQ ID NO: 2799 - protein, 16 aa, synthetic construct
SEMGHDSPHKSGQNQQ

SEQ ID NO: 2800 - protein, 16 aa, synthetic construct
AQQGHDSPHKSGQNQQ

SEQ ID NO: 2801 - protein, 16 aa, synthetic construct
AINGHDSPHKSGQSLQ

SEQ ID NO: 2802 - protein, 16 aa, synthetic construct
TINGSGSPHSKAPNQQ

SEQ ID NO: 2803 - protein, 16 aa, synthetic construct
CGEGHDSPHKSGQNQQ

SEQ ID NO: 2804 - protein, 16 aa, synthetic construct
TVNGHDSPHKSAQNHQ

SEQ ID NO: 2805 - protein, 16 aa, synthetic construct
TVNGHDSPHKSGQTQL

SEQ ID NO: 2806 - protein, 16 aa, synthetic construct
TNNGHDSPHKSGRNRQ

SEQ ID NO: 2807 - protein, 16 aa, synthetic construct
TINGHDSPHKYGQNEQ

SEQ ID NO: 2808 - protein, 16 aa, synthetic construct
TINGNGSPHSKAPNLQ

SEQ ID NO: 2809 - protein, 16 aa, synthetic construct
SINGHDSPHKSQQNQQ

SEQ ID NO: 2810 - protein, 16 aa, synthetic construct
TIGGHDSPHKSGQNQQ

SEQ ID NO: 2811 - protein, 16 aa, synthetic construct
TINGHDSPHKSVQSKQ

SEQ ID NO: 2812 - protein, 16 aa, synthetic construct
ELVGHDSPHKSGQNQQ

SEQ ID NO: 2813 - protein, 16 aa, synthetic construct
ELMGHDSPHKSGQNQQ

SEQ ID NO: 2814 - protein, 16 aa, synthetic construct
TINGNDSPHKIGHNQQ

SEQ ID NO: 2815 - protein, 16 aa, synthetic construct
TIKGGGSPHSKAQDQQ

SEQ ID NO: 2816 - protein, 16 aa, synthetic construct
TVNGHDSPHKSGQTQQ

SEQ ID NO: 2817 - protein, 16 aa, synthetic construct
TINGQDSPHKSGQNPL

SEQ ID NO: 2818 - protein, 16 aa, synthetic construct
TVNASGSPHSKAQNHQ

SEQ ID NO: 2819 - protein, 16 aa, synthetic construct
TINGHDSPHKSGRDQK

SEQ ID NO: 2820 - protein, 16 aa, synthetic construct
TINGHDSPHKSVHNQQ

SEQ ID NO: 2821 - protein, 16 aa, synthetic construct
TINGHDSPHKSGQWKR

SEQ ID NO: 2822 - protein, 16 aa, synthetic construct
TIDGSGSPHSKAENRQ

SEQ ID NO: 2823 - protein, 16 aa, synthetic construct
NEIGHDSPHKSGQNQQ

SEQ ID NO: 2824 - protein, 16 aa, synthetic construct
AINGHDSPHKSGQSQQ

SEQ ID NO: 2825 - protein, 16 aa, synthetic construct
IINGHDSPHKSRQAQQ

SEQ ID NO: 2826 - protein, 16 aa, synthetic construct
TPNGHDSPHKSGQNQQ

SEQ ID NO: 2827 - protein, 16 aa, synthetic construct
ITNGHDSPHKSGQTQQ

SEQ ID NO: 2828 - protein, 16 aa, synthetic construct
TINGHDSPHKSVQNHQ

SEQ ID NO: 2829 - protein, 16 aa, synthetic construct
TINGHDSPHKSKQNQQ

SEQ ID NO: 2830 - protein, 16 aa, synthetic construct
TINGHDSPHKSAQNQL

SEQ ID NO: 2831 - protein, 16 aa, synthetic construct
TVNGHDSPHKSGQTQP

SEQ ID NO: 2832 - protein, 16 aa, synthetic construct
TDQGHDSPHKSGQNQQ

SEQ ID NO: 2833 - protein, 16 aa, synthetic construct
TINGHDSPHKLWINQQ

SEQ ID NO: 2834 - protein, 16 aa, synthetic construct
GINGPDSPHKSGQNQQ

SEQ ID NO: 2835 - protein, 16 aa, synthetic construct
SEIGHDSPHKSGQNQQ

SEQ ID NO: 2836 - protein, 16 aa, synthetic construct
TINGHDSPHKSVQKQL

SEQ ID NO: 2837 - protein, 16 aa, synthetic construct
TINGHPSPHWKGQNQQ

SEQ ID NO: 2838 - protein, 16 aa, synthetic construct
TVNGHDSPHKSGRNQL

SEQ ID NO: 2839 - protein, 16 aa, synthetic construct
TIKGSGSPHSKVQDQQ

SEQ ID NO: 2840 - protein, 16 aa, synthetic construct
SEKGHDSPHKSGQNQQ

SEQ ID NO: 2841 - protein, 16 aa, synthetic construct
WSAGHDSPHKSGQNQQ

SEQ ID NO: 2842 - protein, 16 aa, synthetic construct
ELAGHDSPHKSGQNQQ

SEQ ID NO: 2843 - protein, 16 aa, synthetic construct
TINGHDSPHKMGRNQQ

SEQ ID NO: 2844 - protein, 16 aa, synthetic construct
TINGHDSPHKSGISIQ

SEQ ID NO: 2845 - protein, 16 aa, synthetic construct
TSNGHDSPHKSVQNLQ

SEQ ID NO: 2846 - protein, 16 aa, synthetic construct
QTQGHDSPHKSGQNQQ

SEQ ID NO: 2847 - protein, 16 aa, synthetic construct
TINGHDSPHKMAHNQQ

SEQ ID NO: 2848 - protein, 16 aa, synthetic construct
AINGSGSPHSKAQTQQ

SEQ ID NO: 2849 - protein, 16 aa, synthetic construct
TINGHDSPHKHGQNQQ

SEQ ID NO: 2850 - protein, 16 aa, synthetic construct
GADGHDSPHKSGQNQQ

SEQ ID NO: 2851 - protein, 16 aa, synthetic construct
VGEGHDSPHKSGQNQQ

SEQ ID NO: 2852 - protein, 16 aa, synthetic construct
ANEGHDSPHKSGQNQQ

SEQ ID NO: 2853 - protein, 16 aa, synthetic construct
TEAKSGSPHSKAQNQQ

SEQ ID NO: 2854 - protein, 16 aa, synthetic construct
TINGHDSPHKSVQSQQ

SEQ ID NO: 2855 - protein, 16 aa, synthetic construct
TIPGSGSPHSKAQNLQ

SEQ ID NO: 2856 - protein, 16 aa, synthetic construct
TINGHDSPHKSGQTVC

SEQ ID NO: 2857 - protein, 16 aa, synthetic construct
ELRGHDSPHKSGQNQQ

SEQ ID NO: 2858 - protein, 16 aa, synthetic construct
CQIGHDSPHKSGQNQQ

SEQ ID NO: 2859 - protein, 16 aa, synthetic construct
GVMGHDSPHKSGQNQQ

SEQ ID NO: 2860 - protein, 16 aa, synthetic construct
ACDGHDSPHKSGQNQQ

SEQ ID NO: 2861 - protein, 16 aa, synthetic construct
TINGQDSPHKSGQYQQ

SEQ ID NO: 2862 - protein, 16 aa, synthetic construct
TINGHDSPHKSGQQIM

SEQ ID NO: 2863 - protein, 16 aa, synthetic construct
TINGHDSPHKSRQNEQ

SEQ ID NO: 2864 - protein, 16 aa, synthetic construct
ASNGHDSPHKSGLNHQ

SEQ ID NO: 2865 - protein, 16 aa, synthetic construct
TVNGHDSPHKSGQSQP

SEQ ID NO: 2866 - protein, 16 aa, synthetic construct
NELGHDSPHKSGQNQQ

SEQ ID NO: 2867 - protein, 16 aa, synthetic construct
AAEGHDSPHKSGQNQQ

SEQ ID NO: 2868 - protein, 16 aa, synthetic construct
GQNGHDSPHKSGQNQQ

SEQ ID NO: 2869 - protein, 16 aa, synthetic construct
NEFGHDSPHKSGQNQQ

SEQ ID NO: 2870 - protein, 16 aa, synthetic construct
TSIGYDSPHKSGQNQQ

SEQ ID NO: 2871 - protein, 16 aa, synthetic construct
TDNGHDSPHKSGQNLQ

SEQ ID NO: 2872 - protein, 16 aa, synthetic construct
TITGHDSPHKSRQDQQ

SEQ ID NO: 2873 - protein, 16 aa, synthetic construct
AEHGHDSPHKSGQNQQ

SEQ ID NO: 2874 - protein, 16 aa, synthetic construct
TINGDDSPHKSGQKQL

SEQ ID NO: 2875 - protein, 16 aa, synthetic construct
EILGHDSPHKSGQNQQ

SEQ ID NO: 2876 - protein, 16 aa, synthetic construct
TIHGSGSPHSKAQNQA

SEQ ID NO: 2877 - protein, 16 aa, synthetic construct
AINGDDSPHKSGHNQQ

SEQ ID NO: 2878 - protein, 16 aa, synthetic construct
TSNGHNSPHKSGQNQE

SEQ ID NO: 2879 - protein, 16 aa, synthetic construct
TINGHDSPHKSGQMIH

SEQ ID NO: 2880 - protein, 16 aa, synthetic construct
NAIGHDSPHKSGQNQQ

SEQ ID NO: 2881 - protein, 16 aa, synthetic construct
VINGHDSPHKSGRNHQ

SEQ ID NO: 2882 - protein, 16 aa, synthetic construct
TITGHDSPHKSVQNRQ

SEQ ID NO: 2883 - protein, 16 aa, synthetic construct
TINGHDSPHKSGQKMN

SEQ ID NO: 2884 - protein, 16 aa, synthetic construct
TIHGHDSPHKSGQSQQ

SEQ ID NO: 2885 - protein, 16 aa, synthetic construct
TEIGHDSPHKSGQNQQ

SEQ ID NO: 2886 - protein, 16 aa, synthetic construct
TINGHDSPHKSGQYQH

SEQ ID NO: 2887 - protein, 14 aa, synthetic construct
GSGSPHSKAQNRHT

SEQ ID NO: 2888 - protein, 14 aa, synthetic construct
GSGSPHSKVQNQQT

SEQ ID NO: 2889 - protein, 14 aa, synthetic construct
MSGSPHSKAQNQQT

SEQ ID NO: 2890 - protein, 14 aa, synthetic construct
GSGSPHSKARDQQT

SEQ ID NO: 2891 - protein, 14 aa, synthetic construct
GSGSPHSKAPNLQT

SEQ ID NO: 2892 - protein, 14 aa, synthetic construct
TSGSPHSKAQNQQT

SEQ ID NO: 2893 - protein, 14 aa, synthetic construct
GSGSPHSKAHVRQT

SEQ ID NO: 2894 - protein, 14 aa, synthetic construct
GSGSPHSKAPNQHT

SEQ ID NO: 2895 - protein, 14 aa, synthetic construct
ISGSPHSKAQNQQT

SEQ ID NO: 2896 - protein, 14 aa, synthetic construct
GSGSPHSKTQSQQT

SEQ ID NO: 2897 - skipped

SEQ ID NO: 2898 - protein, 14 aa, synthetic construct
ESGSPHSKAQNQQI

SEQ ID NO: 2899 - protein, 14 aa, synthetic construct
GSGSPHSKAQPAKT

SEQ ID NO: 2900 - protein, 14 aa, synthetic construct
SSGSPHSKAQNQQT

SEQ ID NO: 2901 - protein, 14 aa, synthetic construct
GSGSPHSKSQTQQN

SEQ ID NO: 2902 - protein, 14 aa, synthetic construct
ASGSPHSKAQNQQT

SEQ ID NO: 2903 - protein, 14 aa, synthetic construct
GSGSPHSKAQNLAT

SEQ ID NO: 2904 - protein, 14 aa, synthetic construct
GSGSPHSKSQNQLT

SEQ ID NO: 2905 - protein, 14 aa, synthetic construct
NSGSPHSKAQNQQT

SEQ ID NO: 2906 - protein, 14 aa, synthetic construct
GSGSPHSKAQGQQT

SEQ ID NO: 2907 - protein, 14 aa, synthetic construct
VSGSPHSKAQNQQT

SEQ ID NO: 2908 - protein, 14 aa, synthetic construct
GSGSPHSKALNRQS

SEQ ID NO: 2909 - protein, 14 aa, synthetic construct
LSGSPHSKAQNQQT

SEQ ID NO: 2910 - protein, 14 aa, synthetic construct
GSGSPHSKAHNQQT

SEQ ID NO: 2911 - protein, 14 aa, synthetic construct
GSGSPHSKTQNQQT

SEQ ID NO: 2912 - protein, 14 aa, synthetic construct
GSGSPHSKAQNPPT

SEQ ID NO: 2913 - protein, 14 aa, synthetic construct
GSGSPHSKAQNLQT

SEQ ID NO: 2914 - protein, 14 aa, synthetic construct
GSGSPHSKAQYQQT

SEQ ID NO: 2915 - protein, 14 aa, synthetic construct
GSGSPHSKAQDQET

SEQ ID NO: 2916 - protein, 14 aa, synthetic construct
KSGSPHSKAQNQQT

SEQ ID NO: 2917 - protein, 14 aa, synthetic construct
GSGSPHSKAQNHQT

SEQ ID NO: 2918 - protein, 14 aa, synthetic construct
GSGSPHSKAQDQQT

SEQ ID NO: 2919 - protein, 14 aa, synthetic construct
GSGSPHSKGHWQQT

SEQ ID NO: 2920 - protein, 14 aa, synthetic construct
GSGSPHSKAPNQQT

SEQ ID NO: 2921 - protein, 14 aa, synthetic construct
GSGSPHSKAQNQLI

SEQ ID NO: 2922 - protein, 14 aa, synthetic construct
GSGSPHSKRPEQQT

SEQ ID NO: 2923 - protein, 14 aa, synthetic construct
GSGSPHSKAQRTMT

SEQ ID NO: 2924 - protein, 14 aa, synthetic construct
GSGSPHSKAQNQQH

SEQ ID NO: 2925 - protein, 14 aa, synthetic construct
HSGSPHSKAQNQQT

SEQ ID NO: 2926 - protein, 14 aa, synthetic construct
GSGSPHSKALHQHT

SEQ ID NO: 2927 - protein, 14 aa, synthetic construct
GSGSPHSKAQHRIT

SEQ ID NO: 2928 - protein, 14 aa, synthetic construct
GSGSPHSKAQYIHT

SEQ ID NO: 2929 - protein, 14 aa, synthetic construct
GSGSPHSKAQKFET

SEQ ID NO: 2930 - protein, 14 aa, synthetic construct
ESGSPHSKAQNHQT

SEQ ID NO: 2931 - protein, 14 aa, synthetic construct
GSGSPHSKAQFPST

SEQ ID NO: 2932 - protein, 14 aa, synthetic construct
PSGSPHSKAQNQQT

SEQ ID NO: 2933 - protein, 14 aa, synthetic construct
GSGSPHSKAHNQQR

SEQ ID NO: 2934 - protein, 14 aa, synthetic construct
GSGSPHSKAQAIKT

SEQ ID NO: 2935 - protein, 14 aa, synthetic construct
GSGSPHSKGQNRQT

SEQ ID NO: 2936 - protein, 14 aa, synthetic construct
GSGSPHSKAQSQQT

SEQ ID NO: 2937 - protein, 14 aa, synthetic construct
ASGSPHSKAQNQLT

SEQ ID NO: 2938 - protein, 14 aa, synthetic construct
RSGSPHSKAQNQQT

SEQ ID NO: 2939 - protein, 14 aa, synthetic construct
GSGSPHSKAQYQHT

SEQ ID NO: 2940 - protein, 14 aa, synthetic construct
GSGSPHTKAQNPQS

SEQ ID NO: 2941 - protein, 14 aa, synthetic construct
GSGSPHSKGQNPPT

SEQ ID NO: 2942 - protein, 14 aa, synthetic construct
GSGSPHSKAQHQLT

SEQ ID NO: 2943 - protein, 14 aa, synthetic construct
GSGSPHSKAQSPPT

SEQ ID NO: 2944 - protein, 14 aa, synthetic construct
GSGSPHSKAQAKLT

SEQ ID NO: 2945 - protein, 14 aa, synthetic construct
GSGSPHSKTKSQQT

SEQ ID NO: 2946 - protein, 14 aa, synthetic construct
GSGSPHSKAQDRPT

SEQ ID NO: 2947 - protein, 14 aa, synthetic construct
GSGSPHSKAQSQQL

SEQ ID NO: 2948 - protein, 14 aa, synthetic construct
GSGSPHSKAQAFHT

SEQ ID NO: 2949 - protein, 14 aa, synthetic construct
GSGSPHSKAQKQQD

SEQ ID NO: 2950 - protein, 14 aa, synthetic construct
GSGSPHSKAQNAQT

SEQ ID NO: 2951 - protein, 14 aa, synthetic construct
WSGSPHSKAQNQQT

SEQ ID NO: 2952 - protein, 14 aa, synthetic construct
GSGSPHSKAHNQLT

SEQ ID NO: 2953 - protein, 14 aa, synthetic construct
GSGSPHSKAQNQQY

SEQ ID NO: 2954 - protein, 14 aa, synthetic construct
GSGSPHSKAQKLNT

SEQ ID NO: 2955 - protein, 14 aa, synthetic construct
GSGSPHSKSQNVQT

SEQ ID NO: 2956 - protein, 14 aa, synthetic construct
GSGSPHSKAQAQQT

SEQ ID NO: 2957 - protein, 14 aa, synthetic construct
GSGSPHSKAQNLQA

SEQ ID NO: 2958 - protein, 14 aa, synthetic construct
DSGSPHSKAQNQQT

SEQ ID NO: 2959 - protein, 14 aa, synthetic construct
ASGSPHSKAPNQQT

SEQ ID NO: 2960 - protein, 14 aa, synthetic construct
GSGSPHSKAQTPPT

SEQ ID NO: 2961 - protein, 14 aa, synthetic construct
GSGSPHSKAQYQHA

SEQ ID NO: 2962 - protein, 14 aa, synthetic construct
GSGSPHSKAQGQQA

SEQ ID NO: 2963 - protein, 14 aa, synthetic construct
GSGSPHNKAQNHQT

SEQ ID NO: 2964 - protein, 14 aa, synthetic construct
GSGSPHSKAQPPAT

SEQ ID NO: 2965 - protein, 14 aa, synthetic construct
GSGSPHSKAQERPT

SEQ ID NO: 2966 - protein, 14 aa, synthetic construct
GSGSPHSKAQDLQT

SEQ ID NO: 2967 - protein, 14 aa, synthetic construct
GSGSPHSKAQAMHT

SEQ ID NO: 2968 - protein, 14 aa, synthetic construct
GSGSPHSKALNQQT

SEQ ID NO: 2969 - protein, 14 aa, synthetic construct
GSGSPHSKAQHPST

SEQ ID NO: 2970 - protein, 14 aa, synthetic construct
GSGSPHSKAPGLQT

SEQ ID NO: 2971 - protein, 14 aa, synthetic construct
GSGSPHSKAQGIRT

SEQ ID NO: 2972 - protein, 14 aa, synthetic construct
GSGSPHSKAQAPAT

SEQ ID NO: 2973 - protein, 14 aa, synthetic construct
GSGSPHSKSQSQQI

SEQ ID NO: 2974 - protein, 14 aa, synthetic construct
GSGSPHSKAQIPPT

SEQ ID NO: 2975 - protein, 14 aa, synthetic construct
GSGSPHSKAQTQLT

SEQ ID NO: 2976 - protein, 14 aa, synthetic construct
GSGSPHSKAQAPST

SEQ ID NO: 2977 - protein, 14 aa, synthetic construct
GSGSPHSKGQNQQT

SEQ ID NO: 2978 - protein, 14 aa, synthetic construct
ASGSPHSKAHNQQT

SEQ ID NO: 2979 - protein, 14 aa, synthetic construct
GSGSPHSKAQNTYA

SEQ ID NO: 2980 - protein, 14 aa, synthetic construct
GSGSPHSKSQNQHI

SEQ ID NO: 2981 - protein, 14 aa, synthetic construct
GSGSPHSKAQNHLT

SEQ ID NO: 2982 - protein, 14 aa, synthetic construct
GSGSPHSKAQIGMT

SEQ ID NO: 2983 - protein, 14 aa, synthetic construct
GSGSPHSKALNKQT

SEQ ID NO: 2984 - protein, 14 aa, synthetic construct
GSGSPHSKAQLQQT

SEQ ID NO: 2985 - protein, 14 aa, synthetic construct
GSGSPHSKAQRMST

SEQ ID NO: 2986 - protein, 14 aa, synthetic construct
GSGSPHSKAQGILT

SEQ ID NO: 2987 - protein, 14 aa, synthetic construct
GSGSPHSKAQDRQT

SEQ ID NO: 2988 - protein, 14 aa, synthetic construct
GSGSPHSKARDWQT

SEQ ID NO: 2989 - protein, 14 aa, synthetic construct
GSGSPHSKAQNTHD

SEQ ID NO: 2990 - protein, 14 aa, synthetic construct
GSGSPHSKAPNLQI

SEQ ID NO: 2991 - protein, 14 aa, synthetic construct
GSGSPHSKAQERST

SEQ ID NO: 2992 - protein, 14 aa, synthetic construct
GSGSPHSKAQNYQT

SEQ ID NO: 2993 - protein, 14 aa, synthetic construct
GSGSPHSKAQRTCT

SEQ ID NO: 2994 - protein, 14 aa, synthetic construct
GSGSPHSKAQIGHT

SEQ ID NO: 2995 - protein, 14 aa, synthetic construct
GSGSPHSKAQGAIT

SEQ ID NO: 2996 - protein, 14 aa, synthetic construct
GSGSPHSKAQVPPT

SEQ ID NO: 2997 - protein, 14 aa, synthetic construct
GSGSPHSKAQVQQI

SEQ ID NO: 2998 - protein, 14 aa, synthetic construct
GSGSPHSKALMRQT

SEQ ID NO: 2999 - protein, 14 aa, synthetic construct
GSGSPHSKAQYSVT

SEQ ID NO: 3000 - protein, 14 aa, synthetic construct
GSGSPHSKVPNLQT

SEQ ID NO: 3001 - protein, 14 aa, synthetic construct
GSGSPHSKAQSQQI

SEQ ID NO: 3002 - protein, 14 aa, synthetic construct
GSGSPHSKAQAITT

SEQ ID NO: 3003 - protein, 14 aa, synthetic construct
GSGSPHSKAQKTLT

SEQ ID NO: 3004 - protein, 14 aa, synthetic construct
GSGSPHSKAQNQWT

SEQ ID NO: 3005 - protein, 14 aa, synthetic construct
GSGSPHSKAQLHHT

SEQ ID NO: 3006 - protein, 14 aa, synthetic construct
GSGSPHSKAQNIII

SEQ ID NO: 3007 - protein, 14 aa, synthetic construct
GSGSPHSKAQGHHT

SEQ ID NO: 3008 - protein, 14 aa, synthetic construct
GSGSPHSKAQSKVT

SEQ ID NO: 3009 - protein, 14 aa, synthetic construct
GSGSPHSKAQLPST

SEQ ID NO: 3010 - protein, 14 aa, synthetic construct
GSGSPHSKAIGKQT

SEQ ID NO: 3011 - protein, 14 aa, synthetic construct
GSGSPHSKAQAIHT

SEQ ID NO: 3012 - protein, 14 aa, synthetic construct
GSGSPHSKAQHGLT

SEQ ID NO: 3013 - protein, 14 aa, synthetic construct
GSGSPHSKAQFMCT

SEQ ID NO: 3014 - protein, 14 aa, synthetic construct
VSGSPHSKAQGQQT

SEQ ID NO: 3015 - protein, 14 aa, synthetic construct
GSGSPHSKAQHLQT

SEQ ID NO: 3016 - protein, 14 aa, synthetic construct
GSGSPHSKTQNHQN

SEQ ID NO: 3017 - protein, 14 aa, synthetic construct
GSGSPHSKAQPART

SEQ ID NO: 3018 - protein, 14 aa, synthetic construct
GSGSPHSKAQSLQT

SEQ ID NO: 3019 - protein, 14 aa, synthetic construct
GSGSPHSKSQSQLT

SEQ ID NO: 3020 - protein, 14 aa, synthetic construct
GSGSPHSKAQDRQS

SEQ ID NO: 3021 - protein, 14 aa, synthetic construct
GSGSPHSKAQMPST

SEQ ID NO: 3022 - protein, 14 aa, synthetic construct
GSGSPHSKAQGSLT

SEQ ID NO: 3023 - protein, 14 aa, synthetic construct
GSGSPHSKSQNQQT

SEQ ID NO: 3024 - protein, 14 aa, synthetic construct
GSGSPHSKAQVPAT

SEQ ID NO: 3025 - protein, 14 aa, synthetic construct
GSGSPHSKAQDKQT

SEQ ID NO: 3026 - protein, 14 aa, synthetic construct
GSGSPHSKAHYQQT

SEQ ID NO: 3027 - protein, 14 aa, synthetic construct
GSGSPHSKAQVPST

SEQ ID NO: 3028 - protein, 14 aa, synthetic construct
GSGSPHSKARGEQT

SEQ ID NO: 3029 - protein, 14 aa, synthetic construct
GSGSPHSKAPGQQT

SEQ ID NO: 3030 - protein, 14 aa, synthetic construct
GSGSPHSKAQSLQI

SEQ ID NO: 3031 - protein, 14 aa, synthetic construct
GSGSPHSKRLEQQT

SEQ ID NO: 3032 - protein, 14 aa, synthetic construct
GSGSPHSKAQNQST

SEQ ID NO: 3033 - protein, 14 aa, synthetic construct
GSGSPHSKAQKVIT

SEQ ID NO: 3034 - protein, 14 aa, synthetic construct
GSGSPHSKAQNNDQ

SEQ ID NO: 3035 - protein, 14 aa, synthetic construct
GSGSPHSKAQSVHT

SEQ ID NO: 3036 - protein, 14 aa, synthetic construct
GSGSPHSKAQPLGT

SEQ ID NO: 3037 - protein, 14 aa, synthetic construct
GSGSPHSKAHNQET

SEQ ID NO: 3038 - protein, 14 aa, synthetic construct
GSGSPHSKAQNLQI

SEQ ID NO: 3039 - protein, 14 aa, synthetic construct
GSGSPHSKAQIQQT

SEQ ID NO: 3040 - protein, 14 aa, synthetic construct
GSGSPHSKAQVRNT

SEQ ID NO: 3041 - protein, 14 aa, synthetic construct
GSGSPHSKAPSNQT

SEQ ID NO: 3042 - protein, 14 aa, synthetic construct
GSGSPHSKAQVGHT

SEQ ID NO: 3043 - protein, 14 aa, synthetic construct
GSGSPHSKAQRDIT

SEQ ID NO: 3044 - protein, 14 aa, synthetic construct
GSGSPHSKAQMPNT

SEQ ID NO: 3045 - protein, 14 aa, synthetic construct
GSGSPHSKARGLQT

SEQ ID NO: 3046 - protein, 14 aa, synthetic construct
GSGSPHSKLQKQQT

SEQ ID NO: 3047 - protein, 14 aa, synthetic construct
GSGSPHSKAPSLQT

SEQ ID NO: 3048 - protein, 14 aa, synthetic construct
GSGSPHSKAQRDQT

SEQ ID NO: 3049 - protein, 14 aa, synthetic construct
GSGSPHSKNRDQQT

SEQ ID NO: 3050 - protein, 14 aa, synthetic construct
GSGSPHSKAQAKGT

SEQ ID NO: 3051 - protein, 14 aa, synthetic construct
GSGSPHSKAQSAHT

SEQ ID NO: 3052 - protein, 14 aa, synthetic construct
GSGSPHSKSQNHQT

SEQ ID NO: 3053 - protein, 14 aa, synthetic construct
RSGSPHSKAQDQQT

SEQ ID NO: 3054 - protein, 14 aa, synthetic construct
GSGSPHSKAQSTMT

SEQ ID NO: 3055 - protein, 14 aa, synthetic construct
GSGSPHSKAQREMT

SEQ ID NO: 3056 - protein, 14 aa, synthetic construct
GSGSPHSKAQYRAT

SEQ ID NO: 3057 - protein, 14 aa, synthetic construct
GSGSPHSKNQWQQT

SEQ ID NO: 3058 - protein, 14 aa, synthetic construct
GSGSPHSKAQRMNT

SEQ ID NO: 3059 - protein, 14 aa, synthetic construct
GSGSPHAKAQNHQT

SEQ ID NO: 3060 - protein, 14 aa, synthetic construct
GSGSPHSKAGDSQT

SEQ ID NO: 3061 - protein, 14 aa, synthetic construct
GSGSPHSKLKSQQT

SEQ ID NO: 3062 - protein, 14 aa, synthetic construct
GSGSPHSKAQKIST

SEQ ID NO: 3063 - protein, 14 aa, synthetic construct
GSGSPHSKAPSMQT

SEQ ID NO: 3064 - protein, 14 aa, synthetic construct
GSGSPHSKASPRQT

SEQ ID NO: 3065 - protein, 14 aa, synthetic construct
GSGSPHSKRMEQQT

SEQ ID NO: 3066 - protein, 14 aa, synthetic construct
GSGSPHSKAQYQNT

SEQ ID NO: 3067 - protein, 14 aa, synthetic construct
RSGSPHSKAQNQQI

SEQ ID NO: 3068 - protein, 14 aa, synthetic construct
GSGSPHTKAQNPPT

SEQ ID NO: 3069 - protein, 14 aa, synthetic construct
GSGSPHTKAQNQQT

SEQ ID NO: 3070 - protein, 14 aa, synthetic construct
ASGSPHSKAQHQQT

SEQ ID NO: 3071 - protein, 14 aa, synthetic construct
ASGSPHSKAINQQT

SEQ ID NO: 3072 - protein, 14 aa, synthetic construct
GSGSPHSKAPNQQH

SEQ ID NO: 3073 - protein, 14 aa, synthetic construct
ASGSPHSKAQNHQT

SEQ ID NO: 3074 - protein, 14 aa, synthetic construct
GSGSPHSKAENRQT

SEQ ID NO: 3075 - protein, 14 aa, synthetic construct
GSGSPHSKVQDQQT

SEQ ID NO: 3076 - protein, 14 aa, synthetic construct
GSGSPHSKAQTQQA

SEQ ID NO: 3077 - protein, 14 aa, synthetic construct
GSGSPHSKAQNQAT

SEQ ID NO: 3078 - protein, 14 aa, synthetic construct
GHDSPHKSGQIRQT

SEQ ID NO: 3079 - protein, 14 aa, synthetic construct
GHDSPHKIGQNQHA

SEQ ID NO: 3080 - protein, 14 aa, synthetic construct
GYDSPHKSGQKQQT

SEQ ID NO: 3081 - protein, 14 aa, synthetic construct
GHDSPHKSGQNQQT

SEQ ID NO: 3082 - protein, 14 aa, synthetic construct
GHDSPHKSGQSVQT

SEQ ID NO: 3083 - protein, 14 aa, synthetic construct
GHESPHKSGRSQQT

SEQ ID NO: 3084 - protein, 14 aa, synthetic construct
GHDSPHKSGQNKLE

SEQ ID NO: 3085 - protein, 14 aa, synthetic construct
GHDSPHKTGQNQQK

SEQ ID NO: 3086 - protein, 14 aa, synthetic construct
GRGSPHKRGQNQQT

SEQ ID NO: 3087 - protein, 14 aa, synthetic construct
GHDNPHKSGQNQQT

SEQ ID NO: 3088 - protein, 14 aa, synthetic construct
GQDSPHKSGQHQQA

SEQ ID NO: 3089 - protein, 14 aa, synthetic construct
GHDSPHKSGQIQHT

SEQ ID NO: 3090 - protein, 14 aa, synthetic construct
GHDSPHKSGPRQQT

SEQ ID NO: 3091 - protein, 14 aa, synthetic construct
GHDSPHKSGHTQQT

SEQ ID NO: 3092 - protein, 14 aa, synthetic construct
GHDSPHKSGQRQHT

SEQ ID NO: 3093 - protein, 14 aa, synthetic construct
GHDSPHKSAQSQQT

SEQ ID NO: 3094 - protein, 14 aa, synthetic construct
GHESPHKSGQNQQS

SEQ ID NO: 3095 - protein, 14 aa, synthetic construct
GHDSPHKSLQNQQT

SEQ ID NO: 3096 - protein, 14 aa, synthetic construct
GHDSPHKSGRNQET

SEQ ID NO: 3097 - protein, 14 aa, synthetic construct
GHDSPHKSGQTQLT

SEQ ID NO: 3098 - protein, 14 aa, synthetic construct
GHDSPHKSEKNQQT

SEQ ID NO: 3099 - protein, 14 aa, synthetic construct
GRDSPHKSGQDQQT

SEQ ID NO: 3100 - protein, 14 aa, synthetic construct
GHDSPHKTGHNQQT

SEQ ID NO: 3101 - protein, 14 aa, synthetic construct
AHDSPHKSGQNQLT

SEQ ID NO: 3102 - protein, 14 aa, synthetic construct
GYDSPHKSGQTQQT

SEQ ID NO: 3103 - protein, 14 aa, synthetic construct
GHESPHKSGQTQQI

SEQ ID NO: 3104 - protein, 14 aa, synthetic construct
GHDSPHKSGQSKQA

SEQ ID NO: 3105 - protein, 14 aa, synthetic construct
GHESPHKSGQNQQT

SEQ ID NO: 3106 - protein, 14 aa, synthetic construct
GHDSPHKTGQNQPP

SEQ ID NO: 3107 - protein, 14 aa, synthetic construct
GHDSPHKSGQSPQT

SEQ ID NO: 3108 - protein, 14 aa, synthetic construct
GNDSPHKSVQNQQT

SEQ ID NO: 3109 - protein, 14 aa, synthetic construct
GHDSPHKSAQNYQT

SEQ ID NO: 3110 - protein, 14 aa, synthetic construct
AHDSPHKIGQNHQT

SEQ ID NO: 3111 - protein, 14 aa, synthetic construct
GHESPHKSAQNRQT

SEQ ID NO: 3112 - protein, 14 aa, synthetic construct
GHDSPHKSGQNQQG

SEQ ID NO: 3113 - protein, 14 aa, synthetic construct
GQDSPHKIGQNQQT

SEQ ID NO: 3114 - protein, 14 aa, synthetic construct
GHDSPHKSGQNHLT

SEQ ID NO: 3115 - protein, 14 aa, synthetic construct
GHDSPHKSGQYQHT

SEQ ID NO: 3116 - protein, 14 aa, synthetic construct
GNDSPHKSVQNHQT

SEQ ID NO: 3117 - protein, 14 aa, synthetic construct
GHDSPHKSGQNQWT

SEQ ID NO: 3118 - protein, 14 aa, synthetic construct
GHDSPHKSVQNQHT

SEQ ID NO: 3119 - protein, 14 aa, synthetic construct
GHDSPHKSGQNQHA

SEQ ID NO: 3120 - protein, 14 aa, synthetic construct
GHDSPHKSGQTRQT

SEQ ID NO: 3121 - protein, 14 aa, synthetic construct
GHDSPHKSGQNLHT

SEQ ID NO: 3122 - protein, 14 aa, synthetic construct
GHDSPHKSGLNQQT

SEQ ID NO: 3123 - protein, 14 aa, synthetic construct
GHDSPHKSAQNQET

SEQ ID NO: 3124 - protein, 14 aa, synthetic construct
GHDSPHKSGQHLQT

SEQ ID NO: 3125 - protein, 14 aa, synthetic construct
GHDSPHKSRLNQPT

SEQ ID NO: 3126 - protein, 14 aa, synthetic construct
GHDSPHKSGQKQQT

SEQ ID NO: 3127 - protein, 14 aa, synthetic construct
GQDSPHKSGQNQDT

SEQ ID NO: 3128 - protein, 14 aa, synthetic construct
GHDSPHKSGRNQQT

SEQ ID NO: 3129 - protein, 14 aa, synthetic construct
GHDSPHKSGQNLLT

SEQ ID NO: 3130 - protein, 14 aa, synthetic construct
GHDSPHKSGQLVIT

SEQ ID NO: 3131 - protein, 14 aa, synthetic construct
GHDSPHKSRQSQQT

SEQ ID NO: 3132 - protein, 14 aa, synthetic construct
GHDSPHKSGRTQET

SEQ ID NO: 3133 - protein, 14 aa, synthetic construct
GHDSPHKSVQTHQT

SEQ ID NO: 3134 - protein, 14 aa, synthetic construct
GHDSPHKSGQNQPA

SEQ ID NO: 3135 - protein, 14 aa, synthetic construct
KHDSPHKSGQNQQT

SEQ ID NO: 3136 - protein, 14 aa, synthetic construct
GHDSPHKSGQTQQT

SEQ ID NO: 3137 - protein, 14 aa, synthetic construct
GPDSPHKIGQNQQS

SEQ ID NO: 3138 - protein, 14 aa, synthetic construct
GHDSPHKSVQNQQT

SEQ ID NO: 3139 - protein, 14 aa, synthetic construct
GHDSPHKSRQDQHT

SEQ ID NO: 3140 - protein, 14 aa, synthetic construct
GPDSPHKSGQKQQT

SEQ ID NO: 3141 - protein, 14 aa, synthetic construct
GHDSPHKSRQSQHT

SEQ ID NO: 3142 - protein, 14 aa, synthetic construct
GHDSPHKSVQNQLT

SEQ ID NO: 3143 - protein, 14 aa, synthetic construct
AHDSPHKSGQNQQT

SEQ ID NO: 3144 - protein, 14 aa, synthetic construct
GQDSPHKSGQNQQS

SEQ ID NO: 3145 - protein, 14 aa, synthetic construct
GHDSPHKSGRNQQI

SEQ ID NO: 3146 - protein, 14 aa, synthetic construct
GYDSPHKSGQYQHT

SEQ ID NO: 3147 - protein, 14 aa, synthetic construct
GHDSPHKSRQNQQT

SEQ ID NO: 3148 - protein, 14 aa, synthetic construct
GHDSPHKSWVRQQT

SEQ ID NO: 3149 - protein, 14 aa, synthetic construct
GHESPHKSGQNQHS

SEQ ID NO: 3150 - protein, 14 aa, synthetic construct
GHDSPHKIGHNQQT

SEQ ID NO: 3151 - protein, 14 aa, synthetic construct
WHDSPHKSGQNQQT

SEQ ID NO: 3152 - protein, 14 aa, synthetic construct
RHDSPHKSGQNQQT

SEQ ID NO: 3153 - protein, 14 aa, synthetic construct
GHDSPHKSNAWQQT

SEQ ID NO: 3154 - protein, 14 aa, synthetic construct
GHDSPHKSGQSVPT

SEQ ID NO: 3155 - protein, 14 aa, synthetic construct
GHESPHKSGQNIQP

SEQ ID NO: 3156 - protein, 14 aa, synthetic construct
GHDSPHKSVQNHLN

SEQ ID NO: 3157 - protein, 14 aa, synthetic construct
GHDSPHKIGLDQQT

SEQ ID NO: 3158 - protein, 14 aa, synthetic construct
GHDSPHKRGPDQQS

SEQ ID NO: 3159 - protein, 14 aa, synthetic construct
GHDSPHKSGESQQT

SEQ ID NO: 3160 - protein, 14 aa, synthetic construct
GHDSPHKHGQNHQT

SEQ ID NO: 3161 - protein, 14 aa, synthetic construct
LHDSPHKSGQNQQT

SEQ ID NO: 3162 - protein, 14 aa, synthetic construct
GHDSPHKSVQNKQT

SEQ ID NO: 3163 - protein, 14 aa, synthetic construct
GQVSPHKSGQNQQT

SEQ ID NO: 3164 - protein, 14 aa, synthetic construct
GHDSPHKSGQRQLT

SEQ ID NO: 3165 - protein, 14 aa, synthetic construct
GHDSPHKIGQNQLT

SEQ ID NO: 3166 - protein, 14 aa, synthetic construct
GHDSPHKSGQIIVT

SEQ ID NO: 3167 - protein, 14 aa, synthetic construct
IHDSPHKSGQNQQT

SEQ ID NO: 3168 - protein, 14 aa, synthetic construct
GYDSPHKSGQKQST

SEQ ID NO: 3169 - protein, 14 aa, synthetic construct
MHDSPHKSGQNQQT

SEQ ID NO: 3170 - protein, 14 aa, synthetic construct
GDDSPHKSVQNQQT

SEQ ID NO: 3171 - protein, 14 aa, synthetic construct
GHDSPHKSVQSHQT

SEQ ID NO: 3172 - protein, 14 aa, synthetic construct
GHDSPHKSGQFVVT

SEQ ID NO: 3173 - protein, 14 aa, synthetic construct
GHDSPHKSRQNLQT

SEQ ID NO: 3174 - protein, 14 aa, synthetic construct
GHNSPHKSGQNQET

SEQ ID NO: 3175 - protein, 14 aa, synthetic construct
GHDSPHKSAQNQQI

SEQ ID NO: 3176 - protein, 14 aa, synthetic construct
NHDSPHKSGQNQQT

SEQ ID NO: 3177 - protein, 14 aa, synthetic construct
GHDSPHKSGQSQPT

SEQ ID NO: 3178 - protein, 14 aa, synthetic construct
GHESPHKSGQNEQT

SEQ ID NO: 3179 - protein, 14 aa, synthetic construct
GHDSPHKSAQNQQT

SEQ ID NO: 3180 - protein, 14 aa, synthetic construct
GHDSPHKSGQNQLT

SEQ ID NO: 3181 - protein, 14 aa, synthetic construct
GHDSPHKSAQNLLT

SEQ ID NO: 3182 - protein, 14 aa, synthetic construct
THDSPHKSGQNQQT

SEQ ID NO: 3183 - protein, 14 aa, synthetic construct
GNGSPHKRGQNQQT

SEQ ID NO: 3184 - protein, 14 aa, synthetic construct
GHDSPHKSGQSLQT

SEQ ID NO: 3185 - protein, 14 aa, synthetic construct
GHDSPHKSAQNHQT

SEQ ID NO: 3186 - protein, 14 aa, synthetic construct
GHDSPHKSGRNRQT

SEQ ID NO: 3187 - protein, 14 aa, synthetic construct
EHDSPHKSGQNQQT

SEQ ID NO: 3188 - protein, 14 aa, synthetic construct
GHDSPHKYGQNEQT

SEQ ID NO: 3189 - protein, 14 aa, synthetic construct
RHDSPHKSGHNQQT

SEQ ID NO: 3190 - protein, 14 aa, synthetic construct
GHDSPHKSQQNQQT

SEQ ID NO: 3191 - protein, 14 aa, synthetic construct
GHDSPHKSGQNQQI

SEQ ID NO: 3192 - protein, 14 aa, synthetic construct
QHDSPHKSGQNQQT

SEQ ID NO: 3193 - protein, 14 aa, synthetic construct
RHDSPHKIVQNQQT

SEQ ID NO: 3194 - protein, 14 aa, synthetic construct
YHDSPHKSGQNQQT

SEQ ID NO: 3195 - protein, 14 aa, synthetic construct
GHDSPHKSVQSKQT

SEQ ID NO: 3196 - protein, 14 aa, synthetic construct
GNDSPHKIGHNQQT

SEQ ID NO: 3197 - protein, 14 aa, synthetic construct
HHDSPHKSGQNQQT

SEQ ID NO: 3198 - protein, 14 aa, synthetic construct
GHDSPHKSGQTQQI

SEQ ID NO: 3199 - protein, 14 aa, synthetic construct
GQDSPHKSGQNPLT

SEQ ID NO: 3200 - protein, 14 aa, synthetic construct
GHDSPHKSGRDQKT

SEQ ID NO: 3201 - protein, 14 aa, synthetic construct
GHDSPHKSVHNQQN

SEQ ID NO: 3202 - protein, 14 aa, synthetic construct
GHDSPHKSGQWKRT

SEQ ID NO: 3203 - protein, 14 aa, synthetic construct
GHDSPHKSGQSQQI

SEQ ID NO: 3204 - protein, 14 aa, synthetic construct
GHDSPHKSRQAQQT

SEQ ID NO: 3205 - protein, 14 aa, synthetic construct
GHDSPHKSVQNHQI

SEQ ID NO: 3206 - protein, 14 aa, synthetic construct
GHDSPHKSKQNQQA

SEQ ID NO: 3207 - protein, 14 aa, synthetic construct
GHDSPHKSAQNQLN

SEQ ID NO: 3208 - protein, 14 aa, synthetic construct
GHDSPHKSGQTQPT

SEQ ID NO: 3209 - protein, 14 aa, synthetic construct
FHDSPHKSGQNQQT

SEQ ID NO: 3210 - protein, 14 aa, synthetic construct
GHDSPHKLWINQQT

SEQ ID NO: 3211 - protein, 14 aa, synthetic construct
GPDSPHKSGQNQQT

SEQ ID NO: 3212 - protein, 14 aa, synthetic construct
GHDSPHKSVQKQLT

SEQ ID NO: 3213 - protein, 14 aa, synthetic construct
GHDSPHKSGRNQLA

SEQ ID NO: 3214 - protein, 14 aa, synthetic construct
VHDSPHKSGQNQQS

SEQ ID NO: 3215 - protein, 14 aa, synthetic construct
GHDSPHKMGRNQQS

SEQ ID NO: 3216 - protein, 14 aa, synthetic construct
GHDSPHKSGISIQT

SEQ ID NO: 3217 - protein, 14 aa, synthetic construct
VHDSPHKSGQNQQT

SEQ ID NO: 3218 - protein, 14 aa, synthetic construct
GHDSPHKSVQNLQT

SEQ ID NO: 3219 - protein, 14 aa, synthetic construct
GHDSPHKMAHNQQT

SEQ ID NO: 3220 - protein, 14 aa, synthetic construct
GHDSPHKHGQNQQN

SEQ ID NO: 3221 - protein, 14 aa, synthetic construct
GHDSPHKSVQSQQS

SEQ ID NO: 3222 - protein, 14 aa, synthetic construct
GHDSPHKSGQTVCT

SEQ ID NO: 3223 - protein, 14 aa, synthetic construct
GQDSPHKSGQYQQI

SEQ ID NO: 3224 - protein, 14 aa, synthetic construct
GHDSPHKSGQQIMT

SEQ ID NO: 3225 - protein, 14 aa, synthetic construct
GHDSPHKSRQNEQS

SEQ ID NO: 3226 - protein, 14 aa, synthetic construct
GHDSPHKSGLNHQT

SEQ ID NO: 3227 - protein, 14 aa, synthetic construct
GYDSPHKSGQNQQT

SEQ ID NO: 3228 - protein, 14 aa, synthetic construct
GHDSPHKSGQNLQT

SEQ ID NO: 3229 - protein, 14 aa, synthetic construct
GHDSPHKSRQDQQT

SEQ ID NO: 3230 - protein, 14 aa, synthetic construct
GDDSPHKSGQKQLT

SEQ ID NO: 3231 - protein, 14 aa, synthetic construct
GDDSPHKSGHNQQT

SEQ ID NO: 3232 - protein, 14 aa, synthetic construct
GHDSPHKSGQMIHT

SEQ ID NO: 3233 - protein, 14 aa, synthetic construct
GHDSPHKSGRNHQS

SEQ ID NO: 3234 - protein, 14 aa, synthetic construct
GHDSPHKSVQNRQT

SEQ ID NO: 3235 - protein, 14 aa, synthetic construct
GHDSPHKSGQKMNT

SEQ ID NO: 3236 - protein, 14 aa, synthetic construct
GHDSPHKSGQSQQN

SEQ ID NO: 3237 - protein, 14 aa, synthetic construct
GHDSPHKSGQYQHA

SEQ ID NO: 3238 - skipped

SEQ ID NO: 3239 - protein, 18 aa, synthetic construct
KTIIGSGSPHSKAQNRHT

SEQ ID NO: 3240 - protein, 18 aa, synthetic construct
KTFPGSGSPHSKVQNQQT

SEQ ID NO: 3241 - protein, 18 aa, synthetic construct
KTEKMSGSPHSKAQNQQT

SEQ ID NO: 3242 - protein, 18 aa, synthetic construct
KTVNGSGSPHSKARDQQT

SEQ ID NO: 3243 - protein, 18 aa, synthetic construct
KTFNGSGSPHSKAPNLQT

SEQ ID NO: 3244 - protein, 18 aa, synthetic construct
KTEKTSGSPHSKAQNQQT

SEQ ID NO: 3245 - protein, 18 aa, synthetic construct
KTINGSGSPHSKAHVRQT

SEQ ID NO: 3246 - protein, 18 aa, synthetic construct
KTVNGSGSPHSKAPNQHT

SEQ ID NO: 3247 - protein, 18 aa, synthetic construct
KTEKISGSPHSKAQNQQT

SEQ ID NO: 3248 - protein, 18 aa, synthetic construct
KTVNGSGSPHSKTQSQQT

SEQ ID NO: 3249 - protein, 18 aa, synthetic construct
TTINGSGSPHSKAQNQQT

SEQ ID NO: 3250 - protein, 18 aa, synthetic construct
KSINESGSPHSKAQNQQI

SEQ ID NO: 3251 - protein, 18 aa, synthetic construct
KTERTSGSPHSKAQNQQT

SEQ ID NO: 3252 - protein, 18 aa, synthetic construct
KTINGSGSPHSKAQPAKT

SEQ ID NO: 3253 - protein, 18 aa, synthetic construct
KTEKSSGSPHSKAQNQQT

SEQ ID NO: 3254 - protein, 18 aa, synthetic construct
KTEKGSGSPHSKAQNQQT

SEQ ID NO: 3255 - protein, 18 aa, synthetic construct
KTINGSGSPHSKSQTQQN

SEQ ID NO: 3256 - protein, 18 aa, synthetic construct
KTERISGSPHSKAQNQQT

SEQ ID NO: 3257 - protein, 18 aa, synthetic construct
KTERASGSPHSKAQNQQT

SEQ ID NO: 3258 - protein, 18 aa, synthetic construct
KELHGSGSPHSKAQNQQT

SEQ ID NO: 3259 - protein, 18 aa, synthetic construct
KAINGSGSPHSKAQNLAT

SEQ ID NO: 3260 - protein, 18 aa, synthetic construct
KTVNGSGSPHSKSQNQLT

SEQ ID NO: 3261 - protein, 18 aa, synthetic construct
KTERNSGSPHSKAQNQQT

SEQ ID NO: 3262 - protein, 18 aa, synthetic construct
KTFNGSGSPHSKAQGQQT

SEQ ID NO: 3263 - protein, 18 aa, synthetic construct
KTERVSGSPHSKAQNQQT

SEQ ID NO: 3264 - protein, 18 aa, synthetic construct
KTINGSGSPHSKALNRQS

SEQ ID NO: 3265 - protein, 18 aa, synthetic construct
KTERLSGSPHSKAQNQQT

SEQ ID NO: 3266 - protein, 18 aa, synthetic construct
KTDNGSGSPHSKAHNQQT

SEQ ID NO: 3267 - protein, 18 aa, synthetic construct
KTFHGSGSPHSKTQNQQT

SEQ ID NO: 3268 - protein, 18 aa, synthetic construct
KTSNGSGSPHSKAQNPPT

SEQ ID NO: 3269 - protein, 18 aa, synthetic construct
ETINGSGSPHSKAQNLQT

SEQ ID NO: 3270 - protein, 18 aa, synthetic construct
NTINGSGSPHSKAQNQQT

SEQ ID NO: 3271 - protein, 18 aa, synthetic construct
KTENMSGSPHSKAQNQQT

SEQ ID NO: 3272 - protein, 18 aa, synthetic construct
KTENVSGSPHSKAQNQQT

SEQ ID NO: 3273 - protein, 18 aa, synthetic construct
KTSSGSGSPHSKAQYQQT

SEQ ID NO: 3274 - protein, 18 aa, synthetic construct
KTEKVSGSPHSKAQNQQT

SEQ ID NO: 3275 - protein, 18 aa, synthetic construct
KAINGSGSPHSKAQDQET

SEQ ID NO: 3276 - protein, 18 aa, synthetic construct
KTCNKSGSPHSKAQNQQT

SEQ ID NO: 3277 - protein, 18 aa, synthetic construct
KTEHLSGSPHSKAQNQQT

SEQ ID NO: 3278 - protein, 18 aa, synthetic construct
KAEMGSGSPHSKAQNQQT

SEQ ID NO: 3279 - protein, 18 aa, synthetic construct
KATNGSGSPHSKAQNHQT

SEQ ID NO: 3280 - protein, 18 aa, synthetic construct
KAIKGSGSPHSKAQDQQT

SEQ ID NO: 3281 - protein, 18 aa, synthetic construct
KTINGSGSPHSKGHWQQT

SEQ ID NO: 3282 - protein, 18 aa, synthetic construct
KTDKTSGSPHSKAQNQQT

SEQ ID NO: 3283 - protein, 18 aa, synthetic construct
KTFKGSGSPHSKAPNQQT

SEQ ID NO: 3284 - protein, 18 aa, synthetic construct
KTVNGSGSPHSKAQNQLI

SEQ ID NO: 3285 - protein, 18 aa, synthetic construct
KTINGSGSPHSKRPEQQT

SEQ ID NO: 3286 - protein, 18 aa, synthetic construct
KTINGSGSPHSKAQRTMT

SEQ ID NO: 3287 - protein, 18 aa, synthetic construct
KTEKASGSPHSKAQNQQT

SEQ ID NO: 3288 - protein, 18 aa, synthetic construct
KSDQGSGSPHSKAQNQQT

SEQ ID NO: 3289 - protein, 18 aa, synthetic construct
KTEITSGSPHSKAQNQQT

SEQ ID NO: 3290 - protein, 18 aa, synthetic construct
KTDKSSGSPHSKAQNQQT

SEQ ID NO: 3291 - protein, 18 aa, synthetic construct
KTIDGSGSPHSKAQNQQH

SEQ ID NO: 3292 - protein, 18 aa, synthetic construct
KNTNGSGSPHSKAQNQQT

SEQ ID NO: 3293 - protein, 18 aa, synthetic construct
KTETHSGSPHSKAQNQQT

SEQ ID NO: 3294 - protein, 18 aa, synthetic construct
KTINGSGSPHSKALHQHT

SEQ ID NO: 3295 - protein, 18 aa, synthetic construct
KTINGSGSPHSKAQHRIT

SEQ ID NO: 3296 - protein, 18 aa, synthetic construct
KTINGSGSPHSKAQYIHT

SEQ ID NO: 3297 - protein, 18 aa, synthetic construct
KTENISGSPHSKAQNQQT

SEQ ID NO: 3298 - protein, 18 aa, synthetic construct
KTINGSGSPHSKAQKFET

SEQ ID NO: 3299 - protein, 18 aa, synthetic construct
KTSNESGSPHSKAQNHQT

SEQ ID NO: 3300 - protein, 18 aa, synthetic construct
KTINGSGSPHSKAQFPST

SEQ ID NO: 3301 - protein, 18 aa, synthetic construct
KTERPSGSPHSKAQNQQT

SEQ ID NO: 3302 - protein, 18 aa, synthetic construct
KTERMSGSPHSKAQNQQT

SEQ ID NO: 3303 - protein, 18 aa, synthetic construct
KTERSSGSPHSKAQNQQT

SEQ ID NO: 3304 - protein, 18 aa, synthetic construct
KTELHSGSPHSKAQNQQT

SEQ ID NO: 3305 - protein, 18 aa, synthetic construct
KTELTSGSPHSKAQNQQT

SEQ ID NO: 3306 - protein, 18 aa, synthetic construct
KTINGSGSPHSKAHNQQR

SEQ ID NO: 3307 - protein, 18 aa, synthetic construct
KTINGSGSPHSKAQAIKT

SEQ ID NO: 3308 - protein, 18 aa, synthetic construct
KTENTSGSPHSKAQNQQT

SEQ ID NO: 3309 - protein, 18 aa, synthetic construct
KTIDGSGSPHSKGQNRQT

SEQ ID NO: 3310 - protein, 18 aa, synthetic construct
KNINGSGSPHSKAQSQQT

SEQ ID NO: 3311 - protein, 18 aa, synthetic construct
KTSNASGSPHSKAQNQLT

SEQ ID NO: 3312 - protein, 18 aa, synthetic construct
KTEARSGSPHSKAQNQQT

SEQ ID NO: 3313 - protein, 18 aa, synthetic construct
KTEKNSGSPHSKAQNQQT

SEQ ID NO: 3314 - protein, 18 aa, synthetic construct
KTANGSGSPHSKAQYQQT

SEQ ID NO: 3315 - protein, 18 aa, synthetic construct
KTVNGSGSPHSKAQYQHT

SEQ ID NO: 3316 - protein, 18 aa, synthetic construct
KTINGSGSPHTKAQNPQS

SEQ ID NO: 3317 - protein, 18 aa, synthetic construct
KTINGSGSPHSKGQNPPT

SEQ ID NO: 3318 - protein, 18 aa, synthetic construct
KTIIGSGSPHSKAQHQLT

SEQ ID NO: 3319 - protein, 18 aa, synthetic construct
KTINGSGSPHSKAQSPPT

SEQ ID NO: 3320 - protein, 18 aa, synthetic construct
NTIYGSGSPHSKAQNQQT

SEQ ID NO: 3321 - protein, 18 aa, synthetic construct
KTINGSGSPHSKAQAKLT

SEQ ID NO: 3322 - protein, 18 aa, synthetic construct
KTDKNSGSPHSKAQNQQT

SEQ ID NO: 3323 - protein, 18 aa, synthetic construct
KTINGSGSPHSKTKSQQT

SEQ ID NO: 3324 - protein, 18 aa, synthetic construct
KTINGSGSPHSKAQDRPT

SEQ ID NO: 3325 - protein, 18 aa, synthetic construct
KTINGSGSPHSKAQSQQL

SEQ ID NO: 3326 - protein, 18 aa, synthetic construct
KTENLSGSPHSKAQNQQT

SEQ ID NO: 3327 - protein, 18 aa, synthetic construct
KTINGSGSPHSKAQAFHT

SEQ ID NO: 3328 - protein, 18 aa, synthetic construct
KTINGSGSPHSKAQKQQD

SEQ ID NO: 3329 - protein, 18 aa, synthetic construct
KTFSGSGSPHSKAQNLQT

SEQ ID NO: 3330 - protein, 18 aa, synthetic construct
KAINGSGSPHSKAQNAQT

SEQ ID NO: 3331 - protein, 18 aa, synthetic construct
KTESWSGSPHSKAQNQQT

SEQ ID NO: 3332 - protein, 18 aa, synthetic construct
KTTNGSGSPHSKAHNQLT

SEQ ID NO: 3333 - protein, 18 aa, synthetic construct
KTEDKSGSPHSKAQNQQT

SEQ ID NO: 3334 - protein, 18 aa, synthetic construct
KTESASGSPHSKAQNQQT

SEQ ID NO: 3335 - protein, 18 aa, synthetic construct
KTNNGSGSPHSKAQNQQY

SEQ ID NO: 3336 - protein, 18 aa, synthetic construct
KTDKMSGSPHSKAQNQQT

SEQ ID NO: 3337 - protein, 18 aa, synthetic construct
KEVHGSGSPHSKAQNQQT

SEQ ID NO: 3338 - protein, 18 aa, synthetic construct
KTINGSGSPHSKAQKLNT

SEQ ID NO: 3339 - protein, 18 aa, synthetic construct
KTTNGSGSPHSKAQYQHT

SEQ ID NO: 3340 - protein, 18 aa, synthetic construct
KTISGSGSPHSKAQYQHT

SEQ ID NO: 3341 - protein, 18 aa, synthetic construct
KTESTSGSPHSKAQNQQT

SEQ ID NO: 3342 - protein, 18 aa, synthetic construct
KTINGSGSPHSKSQNVQT

SEQ ID NO: 3343 - protein, 18 aa, synthetic construct
KSINGSGSPHSKAQAQQT

SEQ ID NO: 3344 - protein, 18 aa, synthetic construct
KTVNGSGSPHSKAQNLQA

SEQ ID NO: 3345 - protein, 18 aa, synthetic construct
KTVRDSGSPHSKAQNQQT

SEQ ID NO: 3346 - protein, 18 aa, synthetic construct
KTFNASGSPHSKAPNQQT

SEQ ID NO: 3347 - protein, 18 aa, synthetic construct
KTDRMSGSPHSKAQNQQT

SEQ ID NO: 3348 - protein, 18 aa, synthetic construct
KTINGSGSPHSKAQTPPT

SEQ ID NO: 3349 - protein, 18 aa, synthetic construct
ETIKGSGSPHSKAQNQQT

SEQ ID NO: 3350 - protein, 18 aa, synthetic construct
KNHIGSGSPHSKAQNQQT

SEQ ID NO: 3351 - protein, 18 aa, synthetic construct
KTINGSGSPHSKAQYQHA

SEQ ID NO: 3352 - protein, 18 aa, synthetic construct
KTINGSGSPHSKAQGQQA

SEQ ID NO: 3353 - protein, 18 aa, synthetic construct
KTFNGSGSPHNKAQNHQT

SEQ ID NO: 3354 - protein, 18 aa, synthetic construct
KESDGSGSPHSKAQNQQT

SEQ ID NO: 3355 - protein, 18 aa, synthetic construct
KTINGSGSPHSKAQPPAT

SEQ ID NO: 3356 - protein, 18 aa, synthetic construct
KTINGSGSPHSKAQERPT

SEQ ID NO: 3357 - protein, 18 aa, synthetic construct
KTIKGSGSPHSKAQDLQT

SEQ ID NO: 3358 - protein, 18 aa, synthetic construct
KTDLKSGSPHSKAQNQQT

SEQ ID NO: 3359 - protein, 18 aa, synthetic construct
KTINGSGSPHSKAQAMHT

SEQ ID NO: 3360 - protein, 18 aa, synthetic construct
KTVPNSGSPHSKAQNQQT

SEQ ID NO: 3361 - protein, 18 aa, synthetic construct
KTVIGSGSPHSKALNQQT

SEQ ID NO: 3362 - protein, 18 aa, synthetic construct
KTINGSGSPHSKAQHPST

SEQ ID NO: 3363 - protein, 18 aa, synthetic construct
KTINGSGSPHSKAPGLQT

SEQ ID NO: 3364 - protein, 18 aa, synthetic construct
KTINGSGSPHSKAQGIRT

SEQ ID NO: 3365 - protein, 18 aa, synthetic construct
KTESHSGSPHSKAQNQQT

SEQ ID NO: 3366 - protein, 18 aa, synthetic construct
KTINGSGSPHSKAQAPAT

SEQ ID NO: 3367 - protein, 18 aa, synthetic construct
KTINGSGSPHSKSQSQQI

SEQ ID NO: 3368 - protein, 18 aa, synthetic construct
KAEHGSGSPHSKAQNQQT

SEQ ID NO: 3369 - protein, 18 aa, synthetic construct
KTEDRSGSPHSKAQNQQT

SEQ ID NO: 3370 - protein, 18 aa, synthetic construct
KNCLGSGSPHSKAQNQQT

SEQ ID NO: 3371 - protein, 18 aa, synthetic construct
KTDRGSGSPHSKAQNQQT

SEQ ID NO: 3372 - protein, 18 aa, synthetic construct
KTINGSGSPHSKAQIPPT

SEQ ID NO: 3373 - protein, 18 aa, synthetic construct
KTVKGSGSPHSKAQDQQT

SEQ ID NO: 3374 - protein, 18 aa, synthetic construct
KNADGSGSPHSKAQNQQT

SEQ ID NO: 3375 - protein, 18 aa, synthetic construct
KTDKVSGSPHSKAQNQQT

SEQ ID NO: 3376 - protein, 18 aa, synthetic construct
KTITGSGSPHSKAQTQLT

SEQ ID NO: 3377 - protein, 18 aa, synthetic construct
KTINGSGSPHSKAQAPST

SEQ ID NO: 3378 - protein, 18 aa, synthetic construct
KNCVGSGSPHSKAQNQQT

SEQ ID NO: 3379 - protein, 18 aa, synthetic construct
KTVKDSGSPHSKAQNQQT

SEQ ID NO: 3380 - protein, 18 aa, synthetic construct
KNALGSGSPHSKAQNQQT

SEQ ID NO: 3381 - protein, 18 aa, synthetic construct
KVINGSGSPHSKGQNQQT

SEQ ID NO: 3382 - protein, 18 aa, synthetic construct
KTSNASGSPHSKAHNQQT

SEQ ID NO: 3383 - protein, 18 aa, synthetic construct
KTINGSGSPHSKAQNTYA

SEQ ID NO: 3384 - protein, 18 aa, synthetic construct
KTINGSGSPHSKSQNQHI

SEQ ID NO: 3385 - protein, 18 aa, synthetic construct
KTEFVSGSPHSKAQNQQT

SEQ ID NO: 3386 - protein, 18 aa, synthetic construct
KTVNGSGSPHSKAQNHLT

SEQ ID NO: 3387 - protein, 18 aa, synthetic construct
KTREISGSPHSKAQNQQT

SEQ ID NO: 3388 - protein, 18 aa, synthetic construct
KTINGSGSPHSKAQIGMT

SEQ ID NO: 3389 - protein, 18 aa, synthetic construct
KTIDGSGSPHSKALNKQT

SEQ ID NO: 3390 - protein, 18 aa, synthetic construct
KQGEGSGSPHSKAQNQQT

SEQ ID NO: 3391 - protein, 18 aa, synthetic construct
KTVNGSGSPHSKAQLQQT

SEQ ID NO: 3392 - protein, 18 aa, synthetic construct
KSINGSGSPHSKTQSQQT

SEQ ID NO: 3393 - protein, 18 aa, synthetic construct
KSEKGSGSPHSKAQNQQT

SEQ ID NO: 3394 - protein, 18 aa, synthetic construct
KNVNGSGSPHSKAQNQQT

SEQ ID NO: 3395 - protein, 18 aa, synthetic construct
KGGEGSGSPHSKAQNQQT

SEQ ID NO: 3396 - protein, 18 aa, synthetic construct
KTINGSGSPHSKAQRMST

SEQ ID NO: 3397 - protein, 18 aa, synthetic construct
KTINGSGSPHSKAQGILT

SEQ ID NO: 3398 - protein, 18 aa, synthetic construct
KEFVGSGSPHSKAQNQQT

SEQ ID NO: 3399 - protein, 18 aa, synthetic construct
KTIIGSGSPHSKAQDRQT

SEQ ID NO: 3400 - protein, 18 aa, synthetic construct
KSDKGSGSPHSKAQNQQT

SEQ ID NO: 3401 - protein, 18 aa, synthetic construct
KTEQVSGSPHSKAQNQQT

SEQ ID NO: 3402 - protein, 18 aa, synthetic construct
KTEHVSGSPHSKAQNQQT

SEQ ID NO: 3403 - protein, 18 aa, synthetic construct
KTINGSGSPHSKARDWQT

SEQ ID NO: 3404 - protein, 18 aa, synthetic construct
KTENASGSPHSKAQNQQT

SEQ ID NO: 3405 - protein, 18 aa, synthetic construct
KEVQGSGSPHSKAQNQQT

SEQ ID NO: 3406 - protein, 18 aa, synthetic construct
KTINGSGSPHSKAQNTHD

SEQ ID NO: 3407 - protein, 18 aa, synthetic construct
KTINGSGSPHSKAPNLQI

SEQ ID NO: 3408 - protein, 18 aa, synthetic construct
KTINGSGSPHSKAQERST

SEQ ID NO: 3409 - protein, 18 aa, synthetic construct
KTSNGSGSPHSKAQNYQT

SEQ ID NO: 3410 - protein, 18 aa, synthetic construct
KTEYISGSPHSKAQNQQT

SEQ ID NO: 3411 - protein, 18 aa, synthetic construct
KTINGSGSPHSKAQRTCT

SEQ ID NO: 3412 - protein, 18 aa, synthetic construct
KTINGSGSPHSKAQIGHT

SEQ ID NO: 3413 - protein, 18 aa, synthetic construct
KNCWGSGSPHSKAQNQQT

SEQ ID NO: 3414 - protein, 18 aa, synthetic construct
KTINGSGSPHSKAQGAIT

SEQ ID NO: 3415 - protein, 18 aa, synthetic construct
KTDVNSGSPHSKAQNQQT

SEQ ID NO: 3416 - protein, 18 aa, synthetic construct
KSDIGSGSPHSKAQNQQT

SEQ ID NO: 3417 - protein, 18 aa, synthetic construct
KTINGSGSPHSKAQVPPT

SEQ ID NO: 3418 - protein, 18 aa, synthetic construct
KTINGSGSPHSKAQVQQI

SEQ ID NO: 3419 - protein, 18 aa, synthetic construct
KTINGSGSPHSKALMRQT

SEQ ID NO: 3420 - protein, 18 aa, synthetic construct
KTINGSGSPHSKAQYSVT

SEQ ID NO: 3421 - protein, 18 aa, synthetic construct
KNSIGSGSPHSKAQNQQT

SEQ ID NO: 3422 - protein, 18 aa, synthetic construct
KTINGSGSPHSKVPNLQT

SEQ ID NO: 3423 - protein, 18 aa, synthetic construct
KAINGSGSPHSKAQSQQI

SEQ ID NO: 3424 - protein, 18 aa, synthetic construct
KTINGSGSPHSKAQAITT

SEQ ID NO: 3425 - protein, 18 aa, synthetic construct
KTINGSGSPHSKAQKTLT

SEQ ID NO: 3426 - protein, 18 aa, synthetic construct
KTVNGSGSPHSKAQNQWT

SEQ ID NO: 3427 - protein, 18 aa, synthetic construct
KTINGSGSPHSKAQLHHT

SEQ ID NO: 3428 - protein, 18 aa, synthetic construct
KTEQTSGSPHSKAQNQQT

SEQ ID NO: 3429 - protein, 18 aa, synthetic construct
KTINGSGSPHSKAQNIII

SEQ ID NO: 3430 - protein, 18 aa, synthetic construct
KNSLGSGSPHSKAQNQQT

SEQ ID NO: 3431 - protein, 18 aa, synthetic construct
KTINGSGSPHSKAQGHHT

SEQ ID NO: 3432 - protein, 18 aa, synthetic construct
KTDRTSGSPHSKAQNQQT

SEQ ID NO: 3433 - protein, 18 aa, synthetic construct
KTINGSGSPHSKAQSKVT

SEQ ID NO: 3434 - protein, 18 aa, synthetic construct
KEVVGSGSPHSKAQNQQT

SEQ ID NO: 3435 - protein, 18 aa, synthetic construct
KTINGSGSPHSKAQLPST

SEQ ID NO: 3436 - protein, 18 aa, synthetic construct
KTINGSGSPHSKAIGKQT

SEQ ID NO: 3437 - protein, 18 aa, synthetic construct
KTEPTSGSPHSKAQNQQT

SEQ ID NO: 3438 - protein, 18 aa, synthetic construct
KTINGSGSPHSKAQAIHT

SEQ ID NO: 3439 - protein, 18 aa, synthetic construct
KTINGSGSPHSKAQHGLT

SEQ ID NO: 3440 - protein, 18 aa, synthetic construct
KSELGSGSPHSKAQNQQT

SEQ ID NO: 3441 - protein, 18 aa, synthetic construct
KTINGSGSPHSKAQFMCT

SEQ ID NO: 3442 - protein, 18 aa, synthetic construct
KTINVSGSPHSKAQGQQT

SEQ ID NO: 3443 - protein, 18 aa, synthetic construct
KTVNGSGSPHSKAQHLQT

SEQ ID NO: 3444 - protein, 18 aa, synthetic construct
KTINGSGSPHSKTQNHQN

SEQ ID NO: 3445 - protein, 18 aa, synthetic construct
KTINGSGSPHSKAQPART

SEQ ID NO: 3446 - protein, 18 aa, synthetic construct
KTVNGSGSPHSKAQSLQT

SEQ ID NO: 3447 - protein, 18 aa, synthetic construct
KTINGSGSPHSKSQSQLT

SEQ ID NO: 3448 - protein, 18 aa, synthetic construct
KTWQNSGSPHSKAQNQQT

SEQ ID NO: 3449 - protein, 18 aa, synthetic construct
KTINGSGSPHSKAQDRQS

SEQ ID NO: 3450 - protein, 18 aa, synthetic construct
KTINGSGSPHSKAQMPST

SEQ ID NO: 3451 - protein, 18 aa, synthetic construct
KTINGSGSPHSKAQGSLT

SEQ ID NO: 3452 - protein, 18 aa, synthetic construct
KTEVTSGSPHSKAQNQQT

SEQ ID NO: 3453 - protein, 18 aa, synthetic construct
KTVIGSGSPHSKSQNQQT

SEQ ID NO: 3454 - protein, 18 aa, synthetic construct
KAVNVSGSPHSKAQNQQT

SEQ ID NO: 3455 - protein, 18 aa, synthetic construct
KTDRNSGSPHSKAQNQQT

SEQ ID NO: 3456 - protein, 18 aa, synthetic construct
KTINGSGSPHSKAQVPAT

SEQ ID NO: 3457 - protein, 18 aa, synthetic construct
KGVLGSGSPHSKAQNQQT

SEQ ID NO: 3458 - protein, 18 aa, synthetic construct
KAINGSGSPHSKAQDKQT

SEQ ID NO: 3459 - protein, 18 aa, synthetic construct
KTSNGSGSPHSKAHYQQT

SEQ ID NO: 3460 - protein, 18 aa, synthetic construct
KTINGSGSPHSKAQVPST

SEQ ID NO: 3461 - protein, 18 aa, synthetic construct
KTELRSGSPHSKAQNQQT

SEQ ID NO: 3462 - protein, 18 aa, synthetic construct
KNINGSGSPHSKAQNHQT

SEQ ID NO: 3463 - protein, 18 aa, synthetic construct
KTINGSGSPHSKARGEQT

SEQ ID NO: 3464 - protein, 18 aa, synthetic construct
KTEDLSGSPHSKAQNQQT

SEQ ID NO: 3465 - protein, 18 aa, synthetic construct
KTINGSGSPHSKAPGQQT

SEQ ID NO: 3466 - protein, 18 aa, synthetic construct
KTINGSGSPHSKAQSLQI

SEQ ID NO: 3467 - protein, 18 aa, synthetic construct
KTINGSGSPHSKRLEQQT

SEQ ID NO: 3468 - protein, 18 aa, synthetic construct
KTERGSGSPHSKAQNQQT

SEQ ID NO: 3469 - protein, 18 aa, synthetic construct
KTVNGSGSPHSKAPNQQT

SEQ ID NO: 3470 - protein, 18 aa, synthetic construct
KTSNGSGSPHSKAQNQST

SEQ ID NO: 3471 - protein, 18 aa, synthetic construct
KTINGSGSPHSKAQKVIT

SEQ ID NO: 3472 - protein, 18 aa, synthetic construct
KTEGISGSPHSKAQNQQT

SEQ ID NO: 3473 - protein, 18 aa, synthetic construct
KTINGSGSPHSKAQNNDQ

SEQ ID NO: 3474 - protein, 18 aa, synthetic construct
KTINGSGSPHSKAQSVHT

SEQ ID NO: 3475 - protein, 18 aa, synthetic construct
KTINGSGSPHSKAQPLGT

SEQ ID NO: 3476 - protein, 18 aa, synthetic construct
KTCNASGSPHSKAQNQQT

SEQ ID NO: 3477 - protein, 18 aa, synthetic construct
KAINGSGSPHSKAHNQET

SEQ ID NO: 3478 - protein, 18 aa, synthetic construct
KTEGLSGSPHSKAQNQQT

SEQ ID NO: 3479 - protein, 18 aa, synthetic construct
KTRDASGSPHSKAQNQQT

SEQ ID NO: 3480 - protein, 18 aa, synthetic construct
KTSNGSGSPHSKAQNLQI

SEQ ID NO: 3481 - protein, 18 aa, synthetic construct
KTGNGSGSPHSKAQIQQT

SEQ ID NO: 3482 - protein, 18 aa, synthetic construct
KTDRSSGSPHSKAQNQQT

SEQ ID NO: 3483 - protein, 18 aa, synthetic construct
KTINGSGSPHSKAQVRNT

SEQ ID NO: 3484 - protein, 18 aa, synthetic construct
KTINGSGSPHSKAPSNQT

SEQ ID NO: 3485 - protein, 18 aa, synthetic construct
KTINGSGSPHSKAQVGHT

SEQ ID NO: 3486 - protein, 18 aa, synthetic construct
KNAIGSGSPHSKAQNQQT

SEQ ID NO: 3487 - protein, 18 aa, synthetic construct
KAENGSGSPHSKAQNQQT

SEQ ID NO: 3488 - protein, 18 aa, synthetic construct
KTINGSGSPHSKAQRDIT

SEQ ID NO: 3489 - protein, 18 aa, synthetic construct
KTINGSGSPHSKAQMPNT

SEQ ID NO: 3490 - protein, 18 aa, synthetic construct
KTVNGSGSPHSKSQNQQT

SEQ ID NO: 3491 - protein, 18 aa, synthetic construct
KTINGSGSPHSKARGLQT

SEQ ID NO: 3492 - protein, 18 aa, synthetic construct
KTELGSGSPHSKAQNQQT

SEQ ID NO: 3493 - protein, 18 aa, synthetic construct
KAETGSGSPHSKAQNQQT

SEQ ID NO: 3494 - protein, 18 aa, synthetic construct
KTINGSGSPHSKLQKQQT

SEQ ID NO: 3495 - protein, 18 aa, synthetic construct
KTINGSGSPHSKAPSLQT

SEQ ID NO: 3496 - protein, 18 aa, synthetic construct
KTINGSGSPHSKAQRDQT

SEQ ID NO: 3497 - protein, 18 aa, synthetic construct
KTDVGSGSPHSKAQNQQT

SEQ ID NO: 3498 - protein, 18 aa, synthetic construct
KTINGSGSPHSKNRDQQT

SEQ ID NO: 3499 - protein, 18 aa, synthetic construct
KSINGSGSPHSKAPNLQT

SEQ ID NO: 3500 - protein, 18 aa, synthetic construct
KTINGSGSPHSKAQAKGT

SEQ ID NO: 3501 - protein, 18 aa, synthetic construct
KTVNGSGSPHSKAQDKQT

SEQ ID NO: 3502 - protein, 18 aa, synthetic construct
KTINGSGSPHSKAQSAHT

SEQ ID NO: 3503 - protein, 18 aa, synthetic construct
KTVPTSGSPHSKAQNQQT

SEQ ID NO: 3504 - protein, 18 aa, synthetic construct
KTIDGSGSPHSKSQNHQT

SEQ ID NO: 3505 - protein, 18 aa, synthetic construct
KTDVKSGSPHSKAQNQQT

SEQ ID NO: 3506 - protein, 18 aa, synthetic construct
KAINRSGSPHSKAQDQQT

SEQ ID NO: 3507 - protein, 18 aa, synthetic construct
KTINGSGSPHSKAQSTMT

SEQ ID NO: 3508 - protein, 18 aa, synthetic construct
KTVNASGSPHSKAQNQLT

SEQ ID NO: 3509 - protein, 18 aa, synthetic construct
KTINGSGSPHSKAQREMT

SEQ ID NO: 3510 - protein, 18 aa, synthetic construct
KTVHGSGSPHSKAQSQQT

SEQ ID NO: 3511 - protein, 18 aa, synthetic construct
KTINGSGSPHSKAQYRAT

SEQ ID NO: 3512 - protein, 18 aa, synthetic construct
KTEPMSGSPHSKAQNQQT

SEQ ID NO: 3513 - protein, 18 aa, synthetic construct
KTINGSGSPHSKNQWQQT

SEQ ID NO: 3514 - protein, 18 aa, synthetic construct
KETAGSGSPHSKAQNQQT

SEQ ID NO: 3515 - protein, 18 aa, synthetic construct
KTINGSGSPHSKAQRMNT

SEQ ID NO: 3516 - protein, 18 aa, synthetic construct
KNNLGSGSPHSKAQNQQT

SEQ ID NO: 3517 - protein, 18 aa, synthetic construct
KTINGSGSPHAKAQNHQT

SEQ ID NO: 3518 - protein, 18 aa, synthetic construct
KTINGSGSPHSKAGDSQT

SEQ ID NO: 3519 - protein, 18 aa, synthetic construct
KTINGSGSPHSKLKSQQT

SEQ ID NO: 3520 - protein, 18 aa, synthetic construct
KTINGSGSPHSKAQKIST

SEQ ID NO: 3521 - protein, 18 aa, synthetic construct
KTEYNSGSPHSKAQNQQT

SEQ ID NO: 3522 - protein, 18 aa, synthetic construct
KTINGSGSPHSKAPSMQT

SEQ ID NO: 3523 - protein, 18 aa, synthetic construct
EAINGSGSPHSKAQNQQT

SEQ ID NO: 3524 - protein, 18 aa, synthetic construct
KTINGSGSPHSKASPRQT

SEQ ID NO: 3525 - protein, 18 aa, synthetic construct
KTINGSGSPHSKRMEQQT

SEQ ID NO: 3526 - protein, 18 aa, synthetic construct
KTINGSGSPHSKAQYQNT

SEQ ID NO: 3527 - protein, 18 aa, synthetic construct
KEINGRGSPHSKAQNQQT

SEQ ID NO: 3528 - protein, 18 aa, synthetic construct
KTVNRNGSPHSKAQNQQT

SEQ ID NO: 3529 - protein, 18 aa, synthetic construct
KTINGPGSPHSKAHNQQT

SEQ ID NO: 3530 - protein, 18 aa, synthetic construct
KTSYGNGSPHSKAQNQQT

SEQ ID NO: 3531 - protein, 18 aa, synthetic construct
KSVNGNGSPHSKAQNQQT

SEQ ID NO: 3532 - protein, 18 aa, synthetic construct
KTINGSGSPHGWVQNQQT

SEQ ID NO: 3533 - protein, 18 aa, synthetic construct
KTINGGGSPHSKAQTQQI

SEQ ID NO: 3534 - protein, 18 aa, synthetic construct
KTVHGNGSPHSKAQNQQT

SEQ ID NO: 3535 - protein, 18 aa, synthetic construct
KTINGGGSPHSKAQNQQC

SEQ ID NO: 3536 - protein, 18 aa, synthetic construct
KTIDGGGSPHSKAQNKQT

SEQ ID NO: 3537 - protein, 18 aa, synthetic construct
KTINGGGSPHSKAQNQLI

SEQ ID NO: 3538 - protein, 18 aa, synthetic construct
KNINGGGSPHSKAQNQQT

SEQ ID NO: 3539 - protein, 18 aa, synthetic construct
KTINGGGSPHSKSQNQLT

SEQ ID NO: 3540 - protein, 18 aa, synthetic construct
KTVNGNGSPHSKAQNKQT

SEQ ID NO: 3541 - protein, 18 aa, synthetic construct
KTVNGNGSPHSKAQNQHT

SEQ ID NO: 3542 - protein, 18 aa, synthetic construct
KTINGGGSPHSKALNQQN

SEQ ID NO: 3543 - protein, 18 aa, synthetic construct
KTINGTGSPHSKAQNHQI

SEQ ID NO: 3544 - protein, 18 aa, synthetic construct
KTIIGGGSPHSKAHNQQT

SEQ ID NO: 3545 - protein, 18 aa, synthetic construct
KTINGNGSPHSKAQNPLT

SEQ ID NO: 3546 - protein, 18 aa, synthetic construct
KSIKGNGSPHSKAQNQQT

SEQ ID NO: 3547 - protein, 18 aa, synthetic construct
KTINGGGSPHSKAQSQQI

SEQ ID NO: 3548 - protein, 18 aa, synthetic construct
KTINGSVSPHGKAQNQLT

SEQ ID NO: 3549 - protein, 18 aa, synthetic construct
KTINGIGSPHSKAQNLGT

SEQ ID NO: 3550 - protein, 18 aa, synthetic construct
KTVNGNGSPHSKAQNHQT

SEQ ID NO: 3551 - protein, 18 aa, synthetic construct
KTSNGGGSPHSKAQNLQT

SEQ ID NO: 3552 - protein, 18 aa, synthetic construct
KTINGGGSPHSKSQNQHT

SEQ ID NO: 3553 - protein, 18 aa, synthetic construct
KTVNGGGSPHSKAQSQQT

SEQ ID NO: 3554 - protein, 18 aa, synthetic construct
KTIPIDGSPHSKAQNQQT

SEQ ID NO: 3555 - protein, 18 aa, synthetic construct
KTINGGGSPHSKAQNPPT

SEQ ID NO: 3556 - protein, 18 aa, synthetic construct
KTINGLGSPHSKSQNQQT

SEQ ID NO: 3557 - protein, 18 aa, synthetic construct
KTINGTGSPHSKAQNQQM

SEQ ID NO: 3558 - protein, 18 aa, synthetic construct
KTIRDAGSPHSKAQNQQT

SEQ ID NO: 3559 - protein, 18 aa, synthetic construct
KTVNGGGSPHSKAQNQQS

SEQ ID NO: 3560 - protein, 18 aa, synthetic construct
KTIQDGGSPHSKAQNQQT

SEQ ID NO: 3561 - protein, 18 aa, synthetic construct
KTISGGGSPHSKAQNQQN

SEQ ID NO: 3562 - protein, 18 aa, synthetic construct
KTINGGGSPHSKAQDKQT

SEQ ID NO: 3563 - protein, 18 aa, synthetic construct
KTIIGGGSPHSKAQNPQT

SEQ ID NO: 3564 - protein, 18 aa, synthetic construct
KTINGTGSPHSKAPNQLT

SEQ ID NO: 3565 - protein, 18 aa, synthetic construct
KTFNGGGSPHSKAQYQQT

SEQ ID NO: 3566 - protein, 18 aa, synthetic construct
KTVNGGGSPHSKAQHQQT

SEQ ID NO: 3567 - protein, 18 aa, synthetic construct
KTIPMEGSPHSKAQNQQT

SEQ ID NO: 3568 - protein, 18 aa, synthetic construct
KTVNGGGSPHSKSQNQQT

SEQ ID NO: 3569 - protein, 18 aa, synthetic construct
KTINGGGSPHSKAQNQMT

SEQ ID NO: 3570 - protein, 18 aa, synthetic construct
KTIRENGSPHSKAQNQQT

SEQ ID NO: 3571 - protein, 18 aa, synthetic construct
KTINGSASPHSKAHSQQT

SEQ ID NO: 3572 - protein, 18 aa, synthetic construct
KTNNGGGSPHSKAQNLQT

SEQ ID NO: 3573 - protein, 18 aa, synthetic construct
KSINGGGSPHSKAQYQQT

SEQ ID NO: 3574 - protein, 18 aa, synthetic construct
KTVNGNGSPHSKSQNQQT

SEQ ID NO: 3575 - protein, 18 aa, synthetic construct
KTLNGNGSPHSKAQNLQT

SEQ ID NO: 3576 - protein, 18 aa, synthetic construct
KTINGSGSSHSKAQNQQT

SEQ ID NO: 3577 - protein, 18 aa, synthetic construct
KTVNGGGSPHSKAQNHQT

SEQ ID NO: 3578 - protein, 18 aa, synthetic construct
KTINGGGSPHSKAQYQHT

SEQ ID NO: 3579 - protein, 18 aa, synthetic construct
KTIPKNGSPHSKAQNQQT

SEQ ID NO: 3580 - protein, 18 aa, synthetic construct
KTINKEGSPHSKAQNQQT

SEQ ID NO: 3581 - protein, 18 aa, synthetic construct
KTVNGGGSPHSKAQNLQT

SEQ ID NO: 3582 - protein, 18 aa, synthetic construct
KTIPAIGSPHSKAQNQQT

SEQ ID NO: 3583 - protein, 18 aa, synthetic construct
KTINGGGSPHSKAQNPQA

SEQ ID NO: 3584 - protein, 18 aa, synthetic construct
KTINGNGSPHSKSQNQHT

SEQ ID NO: 3585 - protein, 18 aa, synthetic construct
KTINGGGSPHSKSQNRQT

SEQ ID NO: 3586 - protein, 18 aa, synthetic construct
KTINGGGSPHSKAQRQQT

SEQ ID NO: 3587 - protein, 18 aa, synthetic construct
KTIIKNGSPHSKAQNQQT

SEQ ID NO: 3588 - protein, 18 aa, synthetic construct
KTINGSGSPHSYHVNQQT

SEQ ID NO: 3589 - protein, 18 aa, synthetic construct
KTERVSGSPHSKAQNQQT

SEQ ID NO: 3590 - skipped

SEQ ID NO: 3591 - protein, 18 aa, synthetic construct
KTFNRSGSPHSKAQNQQI

SEQ ID NO: 3592 - protein, 18 aa, synthetic construct
KTINGSGSPHTKAQNPPT

SEQ ID NO: 3593 - protein, 18 aa, synthetic construct
KSLNGSGSPHTKAQNQQT

SEQ ID NO: 3594 - protein, 18 aa, synthetic construct
KTENKSGSPHSKAQNQQT

SEQ ID NO: 3595 - protein, 18 aa, synthetic construct
KTDKGSGSPHSKAQNQQT

SEQ ID NO: 3596 - protein, 18 aa, synthetic construct
KTSNASGSPHSKAQHQQT

SEQ ID NO: 3597 - protein, 18 aa, synthetic construct
KTINASGSPHSKAINQQT

SEQ ID NO: 3598 - protein, 18 aa, synthetic construct
KTINGSGSPHSKAPNQQH

SEQ ID NO: 3599 - protein, 18 aa, synthetic construct
KTVNASGSPHSKAQNHQT

SEQ ID NO: 3600 - protein, 18 aa, synthetic construct
KTIDGSGSPHSKAENRQT

SEQ ID NO: 3601 - protein, 18 aa, synthetic construct
KTIKGSGSPHSKVQDQQT

SEQ ID NO: 3602 - protein, 18 aa, synthetic construct
KAINGSGSPHSKAQTQQA

SEQ ID NO: 3603 - protein, 18 aa, synthetic construct
KTEAKSGSPHSKAQNQQT

SEQ ID NO: 3604 - protein, 18 aa, synthetic construct
KTIPGSGSPHSKAQNLQT

SEQ ID NO: 3605 - protein, 18 aa, synthetic construct
KTIHGSGSPHSKAQNQAT

SEQ ID NO: 3606 - protein, 18 aa, synthetic construct
KAINGHDSPHKSGQIRQT

SEQ ID NO: 3607 - protein, 18 aa, synthetic construct
KTINGHDSPHKIGQNQHA

SEQ ID NO: 3608 - protein, 18 aa, synthetic construct
KAINGYDSPHKSGQKQQT

SEQ ID NO: 3609 - protein, 18 aa, synthetic construct
KTESGHDSPHKSGQNQQT

SEQ ID NO: 3610 - protein, 18 aa, synthetic construct
KTINGHDSPHKSGQSVQT

SEQ ID NO: 3611 - protein, 18 aa, synthetic construct
TTINGHDSPHKSGQNQQT

SEQ ID NO: 3612 - protein, 18 aa, synthetic construct
KTINGHESPHKSGRSQQT

SEQ ID NO: 3613 - protein, 18 aa, synthetic construct
KTINGHDSPHKSGQNKLE

SEQ ID NO: 3614 - protein, 18 aa, synthetic construct
KTINGHDSPHKTGQNQQK

SEQ ID NO: 3615 - protein, 18 aa, synthetic construct
KAINGHDNPHKSGQNQQT

SEQ ID NO: 3616 - protein, 18 aa, synthetic construct
KTINGQDSPHKSGQHQQA

SEQ ID NO: 3617 - protein, 18 aa, synthetic construct
KSINGHDSPHKSGQIQHT

SEQ ID NO: 3618 - protein, 18 aa, synthetic construct
KAINGHDSPHKSGPRQQT

SEQ ID NO: 3619 - protein, 18 aa, synthetic construct
KTVNGHDSPHKSGHTQQT

SEQ ID NO: 3620 - protein, 18 aa, synthetic construct
KSINGHDSPHKSGQRQHT

SEQ ID NO: 3621 - protein, 18 aa, synthetic construct
KAINGHDSPHKSAQSQQT

SEQ ID NO: 3622 - protein, 18 aa, synthetic construct
KSIYGHESPHKSGQNQQS

SEQ ID NO: 3623 - protein, 18 aa, synthetic construct
KTVNGHDSPHKSLQNQQT

SEQ ID NO: 3624 - protein, 18 aa, synthetic construct
KTSNGYDSPHKSGQKQQT

SEQ ID NO: 3625 - protein, 18 aa, synthetic construct
KTVNGHDSPHKSGRNQET

SEQ ID NO: 3626 - protein, 18 aa, synthetic construct
KTTNGHDSPHKSGQTQLT

SEQ ID NO: 3627 - protein, 18 aa, synthetic construct
KAINGHDSPHKSEKNQQT

SEQ ID NO: 3628 - protein, 18 aa, synthetic construct
KIINGRDSPHKSGQDQQT

SEQ ID NO: 3629 - protein, 18 aa, synthetic construct
KTISGHDSPHKTGHNQQT

SEQ ID NO: 3630 - protein, 18 aa, synthetic construct
KTVNAHDSPHKSGQNQLT

SEQ ID NO: 3631 - protein, 18 aa, synthetic construct
KSINGYDSPHKSGQTQQT

SEQ ID NO: 3632 - protein, 18 aa, synthetic construct
KTINGHESPHKSGQTQQI

SEQ ID NO: 3633 - protein, 18 aa, synthetic construct
KTINGHDSPHKSGQSKQA

SEQ ID NO: 3634 - protein, 18 aa, synthetic construct
KAIIGHESPHKSGQNQQT

SEQ ID NO: 3635 - protein, 18 aa, synthetic construct
KTINGHDSPHKTGQNQPP

SEQ ID NO: 3636 - protein, 18 aa, synthetic construct
KAINGHDSPHKSGQSPQT

SEQ ID NO: 3637 - protein, 18 aa, synthetic construct
KTIKGNDSPHKSVQNQQT

SEQ ID NO: 3638 - protein, 18 aa, synthetic construct
KTEFGHDSPHKSGQNQQT

SEQ ID NO: 3639 - protein, 18 aa, synthetic construct
KTINGHDSPHKSAQNYQT

SEQ ID NO: 3640 - protein, 18 aa, synthetic construct
KTINAHDSPHKIGQNHQT

SEQ ID NO: 3641 - protein, 18 aa, synthetic construct
KTINGHESPHKSAQNRQT

SEQ ID NO: 3642 - protein, 18 aa, synthetic construct
KTTNGHDSPHKSGQNQQG

SEQ ID NO: 3643 - protein, 18 aa, synthetic construct
KTIKGQDSPHKIGQNQQT

SEQ ID NO: 3644 - protein, 18 aa, synthetic construct
KTVNGHDSPHKSGQNHLT

SEQ ID NO: 3645 - protein, 18 aa, synthetic construct
KSINGHDSPHKSGQYQHT

SEQ ID NO: 3646 - protein, 18 aa, synthetic construct
KTINGNDSPHKSVQNHQT

SEQ ID NO: 3647 - protein, 18 aa, synthetic construct
KTITGHDSPHKSGQNQWT

SEQ ID NO: 3648 - protein, 18 aa, synthetic construct
KTNNGHDSPHKSVQNQHT

SEQ ID NO: 3649 - protein, 18 aa, synthetic construct
KTIDGHDSPHKSGQNQHA

SEQ ID NO: 3650 - protein, 18 aa, synthetic construct
KTVNGHDSPHKSGQTRQT

SEQ ID NO: 3651 - protein, 18 aa, synthetic construct
KTVNGHDSPHKSGQNLHT

SEQ ID NO: 3652 - protein, 18 aa, synthetic construct
KAISGHDSPHKSGLNQQT

SEQ ID NO: 3653 - protein, 18 aa, synthetic construct
KAINGHDSPHKSAQNQET

SEQ ID NO: 3654 - protein, 18 aa, synthetic construct
KTITGHDSPHKSGQHLQT

SEQ ID NO: 3655 - protein, 18 aa, synthetic construct
KTINGHDSPHKSRLNQPT

SEQ ID NO: 3656 - protein, 18 aa, synthetic construct
KTVDGHDSPHKSGQKQQT

SEQ ID NO: 3657 - protein, 18 aa, synthetic construct
KTINGQDSPHKSGQNQDT

SEQ ID NO: 3658 - protein, 18 aa, synthetic construct
KTIEGHDSPHKSGRNQQT

SEQ ID NO: 3659 - protein, 18 aa, synthetic construct
KTTNGHDSPHKSGQNLLT

SEQ ID NO: 3660 - protein, 18 aa, synthetic construct
KTINGHDSPHKSGQLVIT

SEQ ID NO: 3661 - protein, 18 aa, synthetic construct
KTVNGHDSPHKSRQSQQT

SEQ ID NO: 3662 - protein, 18 aa, synthetic construct
KTINGHDSPHKSGRTQET

SEQ ID NO: 3663 - protein, 18 aa, synthetic construct
KTINGHDSPHKSVQTHQT

SEQ ID NO: 3664 - protein, 18 aa, synthetic construct
KTSNGHDSPHKSGQNQPA

SEQ ID NO: 3665 - protein, 18 aa, synthetic construct
KTEGKHDSPHKSGQNQQT

SEQ ID NO: 3666 - protein, 18 aa, synthetic construct
KVINGHDSPHKSGQTQQT

SEQ ID NO: 3667 - protein, 18 aa, synthetic construct
KTINGPDSPHKIGQNQQS

SEQ ID NO: 3668 - protein, 18 aa, synthetic construct
KAVNGHDSPHKSVQNQQT

SEQ ID NO: 3669 - protein, 18 aa, synthetic construct
KTINGHDSPHKSRQDQHT

SEQ ID NO: 3670 - protein, 18 aa, synthetic construct
KAINGPDSPHKSGQKQQT

SEQ ID NO: 3671 - protein, 18 aa, synthetic construct
KTINGHDSPHKSRQSQHT

SEQ ID NO: 3672 - protein, 18 aa, synthetic construct
KTIYGHDSPHKSVQNQLT

SEQ ID NO: 3673 - protein, 18 aa, synthetic construct
KTVNGHDSPHKSGQNLLT

SEQ ID NO: 3674 - protein, 18 aa, synthetic construct
KTESAHDSPHKSGQNQQT

SEQ ID NO: 3675 - protein, 18 aa, synthetic construct
KTTNGQDSPHKSGQNQQS

SEQ ID NO: 3676 - protein, 18 aa, synthetic construct
KTIDGHDSPHKSGRNQQI

SEQ ID NO: 3677 - protein, 18 aa, synthetic construct
KTINGYDSPHKSGQYQHT

SEQ ID NO: 3678 - protein, 18 aa, synthetic construct
KTDNGHDSPHKSRQNQQT

SEQ ID NO: 3679 - protein, 18 aa, synthetic construct
KTINGHDSPHKSWVRQQT

SEQ ID NO: 3680 - protein, 18 aa, synthetic construct
KTINGHESPHKSGQNQHS

SEQ ID NO: 3681 - protein, 18 aa, synthetic construct
KTVNGHDSPHKIGHNQQT

SEQ ID NO: 3682 - protein, 18 aa, synthetic construct
KTCNGHDSPHKSGRNQQT

SEQ ID NO: 3683 - protein, 18 aa, synthetic construct
KNVVGHDSPHKSGQNQQT

SEQ ID NO: 3684 - protein, 18 aa, synthetic construct
KTELWHDSPHKSGQNQQT

SEQ ID NO: 3685 - protein, 18 aa, synthetic construct
KTELRHDSPHKSGQNQQT

SEQ ID NO: 3686 - protein, 18 aa, synthetic construct
KTINGHDSPHKSNAWQQT

SEQ ID NO: 3687 - protein, 18 aa, synthetic construct
KTDAGHDSPHKSGQNQQT

SEQ ID NO: 3688 - protein, 18 aa, synthetic construct
KTEVGHDSPHKSGQNQQT

SEQ ID NO: 3689 - protein, 18 aa, synthetic construct
KTESRHDSPHKSGQNQQT

SEQ ID NO: 3690 - protein, 18 aa, synthetic construct
KSELGHDSPHKSGQNQQT

SEQ ID NO: 3691 - protein, 18 aa, synthetic construct
KTINGHDSPHKSGQSVPT

SEQ ID NO: 3692 - protein, 18 aa, synthetic construct
KTINGHESPHKSGQNIQP

SEQ ID NO: 3693 - protein, 18 aa, synthetic construct
KTEMKHDSPHKSGQNQQT

SEQ ID NO: 3694 - protein, 18 aa, synthetic construct
KTINGHDSPHKSVQNHLN

SEQ ID NO: 3695 - protein, 18 aa, synthetic construct
KTINGHDSPHKIGLDQQT

SEQ ID NO: 3696 - protein, 18 aa, synthetic construct
KTINGHDSPHKRGPDQQS

SEQ ID NO: 3697 - protein, 18 aa, synthetic construct
KTIKGHDSPHKSGESQQT

SEQ ID NO: 3698 - protein, 18 aa, synthetic construct
KTEGWHDSPHKSGQNQQT

SEQ ID NO: 3699 - protein, 18 aa, synthetic construct
KTINGHDSPHKHGQNHQT

SEQ ID NO: 3700 - protein, 18 aa, synthetic construct
KTEQLHDSPHKSGQNQQT

SEQ ID NO: 3701 - protein, 18 aa, synthetic construct
KTIIGHDSPHKSGQYQHT

SEQ ID NO: 3702 - protein, 18 aa, synthetic construct
KTSNGHDSPHKSVQNKQT

SEQ ID NO: 3703 - protein, 18 aa, synthetic construct
KIVNGQVSPHKSGQNQQT

SEQ ID NO: 3704 - protein, 18 aa, synthetic construct
KTVNGHDSPHKSGQRQLT

SEQ ID NO: 3705 - protein, 18 aa, synthetic construct
KTVNGHDSPHKIGQNQLT

SEQ ID NO: 3706 - protein, 18 aa, synthetic construct
KTINGHDSPHKSGQIIVT

SEQ ID NO: 3707 - protein, 18 aa, synthetic construct
KTEKIHDSPHKSGQNQQT

SEQ ID NO: 3708 - protein, 18 aa, synthetic construct
KTENAHDSPHKSGQNQQT

SEQ ID NO: 3709 - protein, 18 aa, synthetic construct
KIGNGHESPHKSGQNQQT

SEQ ID NO: 3710 - protein, 18 aa, synthetic construct
KEVMGHDSPHKSGQNQQT

SEQ ID NO: 3711 - protein, 18 aa, synthetic construct
KTEVKHDSPHKSGQNQQT

SEQ ID NO: 3712 - protein, 18 aa, synthetic construct
KTINGYDSPHKSGQKQST

SEQ ID NO: 3713 - protein, 18 aa, synthetic construct
KYQVGHDSPHKSGQNQQT

SEQ ID NO: 3714 - protein, 18 aa, synthetic construct
KTEAMHDSPHKSGQNQQT

SEQ ID NO: 3715 - protein, 18 aa, synthetic construct
KTIKGDDSPHKSVQNQQT

SEQ ID NO: 3716 - protein, 18 aa, synthetic construct
KTINGHDSPHKSVQSHQT

SEQ ID NO: 3717 - protein, 18 aa, synthetic construct
KTINGHDSPHKSGQFVVT

SEQ ID NO: 3718 - protein, 18 aa, synthetic construct
KTVNGHDSPHKSRQNLQT

SEQ ID NO: 3719 - protein, 18 aa, synthetic construct
KATNGHNSPHKSGQNQET

SEQ ID NO: 3720 - protein, 18 aa, synthetic construct
KAINGHDSPHKSAQNQQI

SEQ ID NO: 3721 - protein, 18 aa, synthetic construct
KTEHGHDSPHKSGQNQQT

SEQ ID NO: 3722 - protein, 18 aa, synthetic construct
KTVENHDSPHKSGQNQQT

SEQ ID NO: 3723 - protein, 18 aa, synthetic construct
KTIYGHDSPHKSGQSQPT

SEQ ID NO: 3724 - protein, 18 aa, synthetic construct
KTISGHESPHKSGQNEQT

SEQ ID NO: 3725 - protein, 18 aa, synthetic construct
KAIIGHDSPHKSAQNQQT

SEQ ID NO: 3726 - protein, 18 aa, synthetic construct
KAIDGHDSPHKSGQNQLT

SEQ ID NO: 3727 - protein, 18 aa, synthetic construct
KTIMGHDSPHKSVQNQQT

SEQ ID NO: 3728 - protein, 18 aa, synthetic construct
KEVGGHDSPHKSGQNQQT

SEQ ID NO: 3729 - protein, 18 aa, synthetic construct
KTINGHDSPHKSAQNLLT

SEQ ID NO: 3730 - protein, 18 aa, synthetic construct
KTEFTHDSPHKSGQNQQT

SEQ ID NO: 3731 - protein, 18 aa, synthetic construct
KSEMGHDSPHKSGQNQQT

SEQ ID NO: 3732 - protein, 18 aa, synthetic construct
KAQQGHDSPHKSGQNQQT

SEQ ID NO: 3733 - protein, 18 aa, synthetic construct
KTEVMHDSPHKSGQNQQT

SEQ ID NO: 3734 - protein, 18 aa, synthetic construct
KAINGHDSPHKSGQSLQT

SEQ ID NO: 3735 - protein, 18 aa, synthetic construct
KCGEGHDSPHKSGQNQQT

SEQ ID NO: 3736 - protein, 18 aa, synthetic construct
KTVNGHDSPHKSAQNHQT

SEQ ID NO: 3737 - protein, 18 aa, synthetic construct
KTVNGHDSPHKSGQTQLT

SEQ ID NO: 3738 - protein, 18 aa, synthetic construct
KTNNGHDSPHKSGRNRQT

SEQ ID NO: 3739 - protein, 18 aa, synthetic construct
KTCNEHDSPHKSGQNQQT

SEQ ID NO: 3740 - protein, 18 aa, synthetic construct
KTINGHDSPHKYGQNEQT

SEQ ID NO: 3741 - protein, 18 aa, synthetic construct
KASNRHDSPHKSGHNQQT

SEQ ID NO: 3742 - protein, 18 aa, synthetic construct
KTETKHDSPHKSGQNQQT

SEQ ID NO: 3743 - protein, 18 aa, synthetic construct
KSINGHDSPHKSQQNQQT

SEQ ID NO: 3744 - protein, 18 aa, synthetic construct
KTIGGHDSPHKSGQNQQI

SEQ ID NO: 3745 - protein, 18 aa, synthetic construct
KTDPQHDSPHKSGQNQQT

SEQ ID NO: 3746 - protein, 18 aa, synthetic construct
KTINRHDSPHKIVQNQQT

SEQ ID NO: 3747 - protein, 18 aa, synthetic construct
KTEQYHDSPHKSGQNQQT

SEQ ID NO: 3748 - protein, 18 aa, synthetic construct
KTINGHDSPHKSVQSKQT

SEQ ID NO: 3749 - protein, 18 aa, synthetic construct
KELVGHDSPHKSGQNQQT

SEQ ID NO: 3750 - protein, 18 aa, synthetic construct
KTENRHDSPHKSGQNQQT

SEQ ID NO: 3751 - protein, 18 aa, synthetic construct
KELMGHDSPHKSGQNQQT

SEQ ID NO: 3752 - protein, 18 aa, synthetic construct
KTINGNDSPHKIGHNQQT

SEQ ID NO: 3753 - protein, 18 aa, synthetic construct
KTEGHHDSPHKSGQNQQT

SEQ ID NO: 3754 - protein, 18 aa, synthetic construct
KTEGYHDSPHKSGQNQQT

SEQ ID NO: 3755 - protein, 18 aa, synthetic construct
KTVNGHDSPHKSGQTQQI

SEQ ID NO: 3756 - protein, 18 aa, synthetic construct
KTINGQDSPHKSGQNPLT

SEQ ID NO: 3757 - protein, 18 aa, synthetic construct
KTINGHDSPHKSGRDQKT

SEQ ID NO: 3758 - protein, 18 aa, synthetic construct
KTINGHDSPHKSVHNQQN

SEQ ID NO: 3759 - protein, 18 aa, synthetic construct
KTINGHDSPHKSGQWKRT

SEQ ID NO: 3760 - protein, 18 aa, synthetic construct
KNEIGHDSPHKSGQNQQT

SEQ ID NO: 3761 - protein, 18 aa, synthetic construct
KAINGHDSPHKSGQSQQI

SEQ ID NO: 3762 - protein, 18 aa, synthetic construct
KIINGHDSPHKSRQAQQT

SEQ ID NO: 3763 - protein, 18 aa, synthetic construct
KTPNGHDSPHKSGQNQQI

SEQ ID NO: 3764 - protein, 18 aa, synthetic construct
KITNGHDSPHKSGQTQQT

SEQ ID NO: 3765 - protein, 18 aa, synthetic construct
KTINGHDSPHKSVQNHQI

SEQ ID NO: 3766 - protein, 18 aa, synthetic construct
KTINGHDSPHKSKQNQQA

SEQ ID NO: 3767 - protein, 18 aa, synthetic construct
KTINGHDSPHKSAQNQLN

SEQ ID NO: 3768 - protein, 18 aa, synthetic construct
KTDITHDSPHKSGQNQQT

SEQ ID NO: 3769 - protein, 18 aa, synthetic construct
KTVNGHDSPHKSGQTQPT

SEQ ID NO: 3770 - protein, 18 aa, synthetic construct
KTEKFHDSPHKSGQNQQT

SEQ ID NO: 3771 - protein, 18 aa, synthetic construct
KTDQGHDSPHKSGQNQQT

SEQ ID NO: 3772 - protein, 18 aa, synthetic construct
KTINGHDSPHKLWINQQT

SEQ ID NO: 3773 - protein, 18 aa, synthetic construct
KGINGPDSPHKSGQNQQT

SEQ ID NO: 3774 - protein, 18 aa, synthetic construct
KSEIGHDSPHKSGQNQQT

SEQ ID NO: 3775 - protein, 18 aa, synthetic construct
KTINGHDSPHKSVQKQLT

SEQ ID NO: 3776 - protein, 18 aa, synthetic construct
KTVNGHDSPHKSGRNQLA

SEQ ID NO: 3777 - protein, 18 aa, synthetic construct
KTNNVHDSPHKSGQNQQS

SEQ ID NO: 3778 - protein, 18 aa, synthetic construct
KSEKGHDSPHKSGQNQQT

SEQ ID NO: 3779 - protein, 18 aa, synthetic construct
KWSAGHDSPHKSGQNQQT

SEQ ID NO: 3780 - protein, 18 aa, synthetic construct
KELAGHDSPHKSGQNQQT

SEQ ID NO: 3781 - protein, 18 aa, synthetic construct
KTINGHDSPHKMGRNQQS

SEQ ID NO: 3782 - protein, 18 aa, synthetic construct
KTDQAHDSPHKSGQNQQT

SEQ ID NO: 3783 - protein, 18 aa, synthetic construct
KTETQHDSPHKSGQNQQT

SEQ ID NO: 3784 - protein, 18 aa, synthetic construct
KTEMTHDSPHKSGQNQQT

SEQ ID NO: 3785 - protein, 18 aa, synthetic construct
KTINGHDSPHKSGISIQT

SEQ ID NO: 3786 - protein, 18 aa, synthetic construct
KTDAVHDSPHKSGQNQQT

SEQ ID NO: 3787 - protein, 18 aa, synthetic construct
KTSNGHDSPHKSVQNLQT

SEQ ID NO: 3788 - protein, 18 aa, synthetic construct
KTEKYHDSPHKSGQNQQT

SEQ ID NO: 3789 - protein, 18 aa, synthetic construct
KQTQGHDSPHKSGQNQQT

SEQ ID NO: 3790 - protein, 18 aa, synthetic construct
KTINGHDSPHKMAHNQQT

SEQ ID NO: 3791 - protein, 18 aa, synthetic construct
KTINGHDSPHKHGQNQQN

SEQ ID NO: 3792 - protein, 18 aa, synthetic construct
KGADGHDSPHKSGQNQQT

SEQ ID NO: 3793 - protein, 18 aa, synthetic construct
KVGEGHDSPHKSGQNQQT

SEQ ID NO: 3794 - protein, 18 aa, synthetic construct
KANEGHDSPHKSGQNQQT

SEQ ID NO: 3795 - protein, 18 aa, synthetic construct
KTDTMHDSPHKSGQNQQT

SEQ ID NO: 3796 - protein, 18 aa, synthetic construct
KTINGHDSPHKSVQSQQS

SEQ ID NO: 3797 - protein, 18 aa, synthetic construct
KTCIAHDSPHKSGQNQQT

SEQ ID NO: 3798 - protein, 18 aa, synthetic construct
KTINGHDSPHKSGQTVCT

SEQ ID NO: 3799 - protein, 18 aa, synthetic construct
KELRGHDSPHKSGQNQQT

SEQ ID NO: 3800 - protein, 18 aa, synthetic construct
KCQIGHDSPHKSGQNQQT

SEQ ID NO: 3801 - protein, 18 aa, synthetic construct
KGVMGHDSPHKSGQNQQT

SEQ ID NO: 3802 - protein, 18 aa, synthetic construct
KACDGHDSPHKSGQNQQT

SEQ ID NO: 3803 - protein, 18 aa, synthetic construct
KTINGQDSPHKSGQYQQI

SEQ ID NO: 3804 - protein, 18 aa, synthetic construct
KTINGHDSPHKSGQQIMT

SEQ ID NO: 3805 - protein, 18 aa, synthetic construct
KTINGHDSPHKSRQNEQS

SEQ ID NO: 3806 - protein, 18 aa, synthetic construct
KASNGHDSPHKSGLNHQT

SEQ ID NO: 3807 - protein, 18 aa, synthetic construct
KTVNGHDSPHKSGQSQPT

SEQ ID NO: 3808 - protein, 18 aa, synthetic construct
KNELGHDSPHKSGQNQQT

SEQ ID NO: 3809 - protein, 18 aa, synthetic construct
KTETFHDSPHKSGQNQQT

SEQ ID NO: 3810 - protein, 18 aa, synthetic construct
KAAEGHDSPHKSGQNQQT

SEQ ID NO: 3811 - protein, 18 aa, synthetic construct
KGQNGHDSPHKSGQNQQT

SEQ ID NO: 3812 - protein, 18 aa, synthetic construct
KNEFGHDSPHKSGQNQQT

SEQ ID NO: 3813 - protein, 18 aa, synthetic construct
KTSIGYDSPHKSGQNQQT

SEQ ID NO: 3814 - protein, 18 aa, synthetic construct
KTDNGHDSPHKSGQNLQT

SEQ ID NO: 3815 - protein, 18 aa, synthetic construct
KTEGQHDSPHKSGQNQQT

SEQ ID NO: 3816 - protein, 18 aa, synthetic construct
KTITGHDSPHKSRQDQQT

SEQ ID NO: 3817 - protein, 18 aa, synthetic construct
KAEHGHDSPHKSGQNQQT

SEQ ID NO: 3818 - protein, 18 aa, synthetic construct
KTINGDDSPHKSGQKQLT

SEQ ID NO: 3819 - protein, 18 aa, synthetic construct
KCDQGHDSPHKSGQNQQT

SEQ ID NO: 3820 - protein, 18 aa, synthetic construct
KEILGHDSPHKSGQNQQT

SEQ ID NO: 3821 - protein, 18 aa, synthetic construct
KTERNHDSPHKSGQNQQT

SEQ ID NO: 3822 - protein, 18 aa, synthetic construct
KAINGDDSPHKSGHNQQT

SEQ ID NO: 3823 - protein, 18 aa, synthetic construct
KTSNGHNSPHKSGQNQET

SEQ ID NO: 3824 - protein, 18 aa, synthetic construct
KTINGHDSPHKSGQMIHT

SEQ ID NO: 3825 - protein, 18 aa, synthetic construct
KNAIGHDSPHKSGQNQQT

SEQ ID NO: 3826 - protein, 18 aa, synthetic construct
KTDKFHDSPHKSGQNQQT

SEQ ID NO: 3827 - protein, 18 aa, synthetic construct
KTEGFHDSPHKSGQNQQT

SEQ ID NO: 3828 - protein, 18 aa, synthetic construct
KVINGHDSPHKSGRNHQS

SEQ ID NO: 3829 - protein, 18 aa, synthetic construct
KTITGHDSPHKSVQNRQT

SEQ ID NO: 3830 - protein, 18 aa, synthetic construct
KTPDMHDSPHKSGQNQQT

SEQ ID NO: 3831 - protein, 18 aa, synthetic construct
KTINGHDSPHKSGQKMNT

SEQ ID NO: 3832 - protein, 18 aa, synthetic construct
KTELQHDSPHKSGQNQQT

SEQ ID NO: 3833 - protein, 18 aa, synthetic construct
KTIHGHDSPHKSGQSQQN

SEQ ID NO: 3834 - protein, 18 aa, synthetic construct
KTEIGHDSPHKSGQNQQT

SEQ ID NO: 3835 - protein, 18 aa, synthetic construct
KTINGHDSPHKSGQYQHA

SEQ ID NO: 3836 - protein, 18 aa, synthetic construct
KTELYHDSPHKSGQNQQT

SEQ ID NO: 3837 - protein, 18 aa, synthetic construct
KTINGRGSPHKRGQNQQT

SEQ ID NO: 3838 - protein, 18 aa, synthetic construct
KTINGHGSPHSKAQNPQT

SEQ ID NO: 3839 - protein, 18 aa, synthetic construct
KTFNGSASPHSKALNQQT

SEQ ID NO: 3840 - protein, 18 aa, synthetic construct
KTINGCGSPHASGQNQQT

SEQ ID NO: 3841 - protein, 18 aa, synthetic construct
KTINGNGSPHSKAQNHQA

SEQ ID NO: 3842 - protein, 18 aa, synthetic construct
KTINGMGSPHSKTQNQQT

SEQ ID NO: 3843 - protein, 18 aa, synthetic construct
KTVNGTGSPHSKAQNQLT

SEQ ID NO: 3844 - protein, 18 aa, synthetic construct
KTIHGNGSPHSKAQNQET

SEQ ID NO: 3845 - protein, 18 aa, synthetic construct
KAINGNGSPHKRGQNQQT

SEQ ID NO: 3846 - protein, 18 aa, synthetic construct
KTINGNGSPHSKAPNLQT

SEQ ID NO: 3847 - protein, 18 aa, synthetic construct
KTIKGGGSPHSKAQDQQT

SEQ ID NO: 3848 - protein, 18 aa, synthetic construct
KTINGHPSPHWKGQNQQT

SEQ ID NO: 3849-4061 - skipped (213 entries)

SEQ ID NO: 4062 - protein, 18 aa, synthetic construct
KTVNGHDSPHSKAQNQQT

SEQ ID NO: 4063-4097 - skipped (35 entries)

SEQ ID NO: 4098 - protein, 18 aa, synthetic construct
KTISKRGSPHSKAQNQQT

SEQ ID NO: 4099 - protein, 18 aa, synthetic construct
KGLGGSGSPHSKAQNQQT

SEQ ID NO: 4100 - protein, 18 aa, synthetic construct
KTINGHDSPHSKAQNLQT

SEQ ID NO: 4101 - protein, 18 aa, synthetic construct
KTINGHDSPHSKAQNQQI

SEQ ID NO: 4102 - protein, 18 aa, synthetic construct
KTINGSGSPHFTRQNQQT

SEQ ID NO: 4103 - protein, 18 aa, synthetic construct
KTINGSGSPHSLPWNQQT

SEQ ID NO: 4104 - protein, 18 aa, synthetic construct
KTINGHDSPHSKAQNHQT

SEQ ID NO: 4105 - protein, 18 aa, synthetic construct
KTMNGHDSPHSKAQNQQT

SEQ ID NO: 4106 - protein, 18 aa, synthetic construct
KPYKGSGSPHSKAQNQQT

SEQ ID NO: 4107 - protein, 18 aa, synthetic construct
KRLWGSGSPHSKAQNQQT

SEQ ID NO: 4108 - protein, 18 aa, synthetic construct
KRMRGSGSPHSKAQNQQT

SEQ ID NO: 4109 - protein, 18 aa, synthetic construct
KRTYGSGSPHSKAQNQQT

SEQ ID NO: 4110 - protein, 18 aa, synthetic construct
KTINCLRSPHSKAQNQQT

SEQ ID NO: 4111 - protein, 18 aa, synthetic construct
KTINFSRSPHSKAQNQQT

SEQ ID NO: 4112 - protein, 18 aa, synthetic construct
KTINGLRSPHFKAQNQQT

SEQ ID NO: 4113 - protein, 18 aa, synthetic construct
KTINGNRSPHNKAQNQQT

SEQ ID NO: 4114 - protein, 18 aa, synthetic construct
KTINGPRSPHYKAQNQQT

SEQ ID NO: 4115 - protein, 18 aa, synthetic construct
KTINGQASPHWKAQNQQT

SEQ ID NO: 4116 - protein, 18 aa, synthetic construct
KTINGRCSPHSKAQNQQT

SEQ ID NO: 4117 - protein, 18 aa, synthetic construct
KTINGRHSPHSKAQNQQT

SEQ ID NO: 4118 - protein, 18 aa, synthetic construct
KTINGRKSPHRKAQNQQT

SEQ ID NO: 4119 - protein, 18 aa, synthetic construct
KTINGRLSPHWKAQNQQT

SEQ ID NO: 4120 - protein, 18 aa, synthetic construct
KTINGRLSPHYKAQNQQT

SEQ ID NO: 4121 - protein, 18 aa, synthetic construct
KTINGRPSPHMKAQNQQT

SEQ ID NO: 4122 - protein, 18 aa, synthetic construct
KTINGRSSPHWKAQNQQT

SEQ ID NO: 4123 - protein, 18 aa, synthetic construct
KTINGRWSPHSKAQNQQT

SEQ ID NO: 4124 - protein, 18 aa, synthetic construct
KTINGSGSPHAPCQNQQT

SEQ ID NO: 4125 - protein, 18 aa, synthetic construct
KTINGSGSPHAWAQNQQT

SEQ ID NO: 4126 - protein, 18 aa, synthetic construct
KTINGSGSPHCMRQNQQT

SEQ ID NO: 4127 - protein, 18 aa, synthetic construct
KTINGSGSPHFCSQNQQT

SEQ ID NO: 4128 - protein, 18 aa, synthetic construct
KTINGSGSPHFLFQNQQT

SEQ ID NO: 4129 - protein, 18 aa, synthetic construct
KTINGSGSPHFWAQNQQT

SEQ ID NO: 4130 - protein, 18 aa, synthetic construct
KTINGSGSPHLCAQNQQT

SEQ ID NO: 4131 - protein, 18 aa, synthetic construct
KTINGSGSPHLRYQNQQT

SEQ ID NO: 4132 - protein, 18 aa, synthetic construct
KTINGSGSPHLYYQNQQT

SEQ ID NO: 4133 - protein, 18 aa, synthetic construct
KTINGSGSPHPLCQNQQT

SEQ ID NO: 4134 - protein, 18 aa, synthetic construct
KTINGSGSPHRIRQNQQT

SEQ ID NO: 4135 - protein, 18 aa, synthetic construct
KTINGSGSPHRLFQNQQT

SEQ ID NO: 4136 - protein, 18 aa, synthetic construct
KTINGSGSPHSCGQNQQT

SEQ ID NO: 4137 - protein, 18 aa, synthetic construct
KTINGSGSPHSCLRNQQT

SEQ ID NO: 4138 - protein, 18 aa, synthetic construct
KTINGSGSPHSCLSNQQT

SEQ ID NO: 4139 - protein, 18 aa, synthetic construct
KTINGSGSPHSCRLNQQT

SEQ ID NO: 4140 - protein, 18 aa, synthetic construct
KTINGSGSPHSCSLNQQT

SEQ ID NO: 4141 - protein, 18 aa, synthetic construct
KTINGSGSPHSKACTLQT

SEQ ID NO: 4142 - protein, 18 aa, synthetic construct
KTINGSGSPHSKAFRAQT

SEQ ID NO: 4143 - protein, 18 aa, synthetic construct
KTINGSGSPHSKAIRKQT

SEQ ID NO: 4144 - protein, 18 aa, synthetic construct
KTINGSGSPHSKAQASRT

SEQ ID NO: 4145 - protein, 18 aa, synthetic construct
KTINGSGSPHSKAQFELT

SEQ ID NO: 4146 - protein, 18 aa, synthetic construct
KTINGSGSPHSKAQIVIT

SEQ ID NO: 4147 - protein, 18 aa, synthetic construct
KTINGSGSPHSKAQLART

SEQ ID NO: 4148 - protein, 18 aa, synthetic construct
KTINGSGSPHSKAQLQRT

SEQ ID NO: 4149 - protein, 18 aa, synthetic construct
KTINGSGSPHSKAQNARR

SEQ ID NO: 4150 - protein, 18 aa, synthetic construct
KTINGSGSPHSKAQNCPR

SEQ ID NO: 4151 - protein, 18 aa, synthetic construct
KTINGSGSPHSKAQNMRR

SEQ ID NO: 4152 - protein, 18 aa, synthetic construct
KTINGSGSPHSKAQNRRV

SEQ ID NO: 4153 - protein, 18 aa, synthetic construct
KTINGSGSPHSKAQPSRT

SEQ ID NO: 4154 - protein, 18 aa, synthetic construct
KTINGSGSPHSKAQQVKT

SEQ ID NO: 4155 - protein, 18 aa, synthetic construct
KTINGSGSPHSKAQQVRT

SEQ ID NO: 4156 - protein, 18 aa, synthetic construct
KTINGSGSPHSKAQRLKT

SEQ ID NO: 4157 - protein, 18 aa, synthetic construct
KTINGSGSPHSKAQRRAT

SEQ ID NO: 4158 - protein, 18 aa, synthetic construct
KTINGSGSPHSKAQRRGT

SEQ ID NO: 4159 - protein, 18 aa, synthetic construct
KTINGSGSPHSKAQRRRT

SEQ ID NO: 4160 - protein, 18 aa, synthetic construct
KTINGSGSPHSKAQRTRT

SEQ ID NO: 4161 - protein, 18 aa, synthetic construct
KTINGSGSPHSKAQRVHT

SEQ ID NO: 4162 - protein, 18 aa, synthetic construct
KTINGSGSPHSKAQTYRT

SEQ ID NO: 4163 - protein, 18 aa, synthetic construct
KTINGSGSPHSKAQVRKT

SEQ ID NO: 4164 - protein, 18 aa, synthetic construct
KTINGSGSPHSKARGRQT

SEQ ID NO: 4165 - protein, 18 aa, synthetic construct
KTINGSGSPHSKARLCQT

SEQ ID NO: 4166 - protein, 18 aa, synthetic construct
KTINGSGSPHSKARLKQT

SEQ ID NO: 4167 - protein, 18 aa, synthetic construct
KTINGSGSPHSKARNSQT

SEQ ID NO: 4168 - protein, 18 aa, synthetic construct
KTINGSGSPHSKARWVQT

SEQ ID NO: 4169 - protein, 18 aa, synthetic construct
KTINGSGSPHSKAVRWQT

SEQ ID NO: 4170 - protein, 18 aa, synthetic construct
KTINGSGSPHSKAYTRQT

SEQ ID NO: 4171 - protein, 18 aa, synthetic construct
KTINGSGSPHSKCQSQQT

SEQ ID NO: 4172 - protein, 18 aa, synthetic construct
KTINGSGSPHSKFLRQQT

SEQ ID NO: 4173 - protein, 18 aa, synthetic construct
KTINGSGSPHSKFRFQQT

SEQ ID NO: 4174 - protein, 18 aa, synthetic construct
KTINGSGSPHSKFRLQQT

SEQ ID NO: 4175 - protein, 18 aa, synthetic construct
KTINGSGSPHSKFRRQQT

SEQ ID NO: 4176 - protein, 18 aa, synthetic construct
KTINGSGSPHSKGMKQQT

SEQ ID NO: 4177 - protein, 18 aa, synthetic construct
KTINGSGSPHSKKLRQQT

SEQ ID NO: 4178 - protein, 18 aa, synthetic construct
KTINGSGSPHSKKRPQQT

SEQ ID NO: 4179 - protein, 18 aa, synthetic construct
KTINGSGSPHSKKSRQQT

SEQ ID NO: 4180 - protein, 18 aa, synthetic construct
KTINGSGSPHSKLYRQQT

SEQ ID NO: 4181 - protein, 18 aa, synthetic construct
KTINGSGSPHSKLYWQQT

SEQ ID NO: 4182 - protein, 18 aa, synthetic construct
KTINGSGSPHSKPRMQQT

SEQ ID NO: 4183 - protein, 18 aa, synthetic construct
KTINGSGSPHSKRFPQQT

SEQ ID NO: 4184 - protein, 18 aa, synthetic construct
KTINGSGSPHSKRFRQQT

SEQ ID NO: 4185 - protein, 18 aa, synthetic construct
KTINGSGSPHSKRPYQQT

SEQ ID NO: 4186 - protein, 18 aa, synthetic construct
KTINGSGSPHSKRRMQQT

SEQ ID NO: 4187 - protein, 18 aa, synthetic construct
KTINGSGSPHSKRSKQQT

SEQ ID NO: 4188 - protein, 18 aa, synthetic construct
KTINGSGSPHSKRSRQQT

SEQ ID NO: 4189 - protein, 18 aa, synthetic construct
KTINGSGSPHSKRTMQQT

SEQ ID NO: 4190 - protein, 18 aa, synthetic construct
KTINGSGSPHSKRTRQQT

SEQ ID NO: 4191 - protein, 18 aa, synthetic construct
KTINGSGSPHSKRVRQQT

SEQ ID NO: 4192 - protein, 18 aa, synthetic construct
KTINGSGSPHSKRYIQQT

SEQ ID NO: 4193 - protein, 18 aa, synthetic construct
KTINGSGSPHSKRYNQQT

SEQ ID NO: 4194 - protein, 18 aa, synthetic construct
KTINGSGSPHSKRYPQQT

SEQ ID NO: 4195 - protein, 18 aa, synthetic construct
KTINGSGSPHSKRYSQQT

SEQ ID NO: 4196 - protein, 18 aa, synthetic construct
KTINGSGSPHSKTCIQQT

SEQ ID NO: 4197 - protein, 18 aa, synthetic construct
KTINGSGSPHSKWLTQQT

SEQ ID NO: 4198 - protein, 18 aa, synthetic construct
KTINGSGSPHSKWVVQQT

SEQ ID NO: 4199 - protein, 18 aa, synthetic construct
KTINGSGSPHSKYRLQQT

SEQ ID NO: 4200 - protein, 18 aa, synthetic construct
KTINGSGSPHSKYSKQQT

SEQ ID NO: 4201 - protein, 18 aa, synthetic construct
KTINGSGSPHSKYSRQQT

SEQ ID NO: 4202 - protein, 18 aa, synthetic construct
KTINGSGSPHSLKRNQQT

SEQ ID NO: 4203 - protein, 18 aa, synthetic construct
KTINGSGSPHSLWFNQQT

SEQ ID NO: 4204 - protein, 18 aa, synthetic construct
KTINGSGSPHSLWPNQQT

SEQ ID NO: 4205 - protein, 18 aa, synthetic construct
KTINGSGSPHSLWTNQQT

SEQ ID NO: 4206 - protein, 18 aa, synthetic construct
KTINGSGSPHSMRRNQQT

SEQ ID NO: 4207 - protein, 18 aa, synthetic construct
KTINGSGSPHSPCLNQQT

SEQ ID NO: 4208 - protein, 18 aa, synthetic construct
KTINGSGSPHSQWQNQQT

SEQ ID NO: 4209 - protein, 18 aa, synthetic construct
KTINGSGSPHSRCANQQT

SEQ ID NO: 4210 - protein, 18 aa, synthetic construct
KTINGSGSPHSRIRNQQT

SEQ ID NO: 4211 - protein, 18 aa, synthetic construct
KTINGSGSPHSRKSNQQT

SEQ ID NO: 4212 - protein, 18 aa, synthetic construct
KTINGSGSPHSRLWNQQT

SEQ ID NO: 4213 - protein, 18 aa, synthetic construct
KTINGSGSPHSRRFNQQT

SEQ ID NO: 4214 - protein, 18 aa, synthetic construct
KTINGSGSPHSRRPNQQT

SEQ ID NO: 4215 - protein, 18 aa, synthetic construct
KTINGSGSPHSRSCNQQT

SEQ ID NO: 4216 - protein, 18 aa, synthetic construct
KTINGSGSPHSRSKNQQT

SEQ ID NO: 4217 - protein, 18 aa, synthetic construct
KTINGSGSPHSRTKNQQT

SEQ ID NO: 4218 - protein, 18 aa, synthetic construct
KTINGSGSPHSRWLNQQT

SEQ ID NO: 4219 - protein, 18 aa, synthetic construct
KTINGSGSPHSSVCNQQT

SEQ ID NO: 4220 - protein, 18 aa, synthetic construct
KTINGSGSPHSSWRNQQT

SEQ ID NO: 4221 - protein, 18 aa, synthetic construct
KTINGSGSPHSVCQNQQT

SEQ ID NO: 4222 - protein, 18 aa, synthetic construct
KTINGSGSPHSVLCNQQT

SEQ ID NO: 4223 - protein, 18 aa, synthetic construct
KTINGSGSPHSVRRNQQT

SEQ ID NO: 4224 - protein, 18 aa, synthetic construct
KTINGSGSPHSVSCNQQT

SEQ ID NO: 4225 - protein, 18 aa, synthetic construct
KTINGSGSPHSWALNQQT

SEQ ID NO: 4226 - protein, 18 aa, synthetic construct
KTINGSGSPHSWITNQQT

SEQ ID NO: 4227 - protein, 18 aa, synthetic construct
KTINGSGSPHSWPMNQQT

SEQ ID NO: 4228 - protein, 18 aa, synthetic construct
KTINGSGSPHSWRSNQQT

SEQ ID NO: 4229 - protein, 18 aa, synthetic construct
KTINGSGSPHSYFLNQQT

SEQ ID NO: 4230 - protein, 18 aa, synthetic construct
KTINGSGSPHSYTYNQQT

SEQ ID NO: 4231 - protein, 18 aa, synthetic construct
KTINGSGSPHSYWQNQQT

SEQ ID NO: 4232 - protein, 18 aa, synthetic construct
KTINGSGSPHTLCQNQQT

SEQ ID NO: 4233 - protein, 18 aa, synthetic construct
KTINGSGSPHWLRQNQQT

SEQ ID NO: 4234 - protein, 18 aa, synthetic construct
KTINGSGSPHWPSQNQQT

SEQ ID NO: 4235 - protein, 18 aa, synthetic construct
KTINGSGSPHYLRQNQQT

SEQ ID NO: 4236 - protein, 18 aa, synthetic construct
KTINGSGSPHYTRQNQQT

SEQ ID NO: 4237 - protein, 18 aa, synthetic construct
KTINGSLSPHLWAQNQQT

SEQ ID NO: 4238 - protein, 18 aa, synthetic construct
KTINGSPSPHCQAQNQQT

SEQ ID NO: 4239 - protein, 18 aa, synthetic construct
KTINGSRSPHLCAQNQQT

SEQ ID NO: 4240 - protein, 18 aa, synthetic construct
KTINGSRSPHWRAQNQQT

SEQ ID NO: 4241 - protein, 18 aa, synthetic construct
KTINGSVSPHWLAQNQQT

SEQ ID NO: 4242 - protein, 18 aa, synthetic construct
KTINGTFSPHRKAQNQQT

SEQ ID NO: 4243 - protein, 18 aa, synthetic construct
KTINGWTSPHRKAQNQQT

SEQ ID NO: 4244 - protein, 18 aa, synthetic construct
KTINRGISPHSKAQNQQT

SEQ ID NO: 4245 - protein, 18 aa, synthetic construct
KTINTVRSPHSKAQNQQT

SEQ ID NO: 4246 - protein, 18 aa, synthetic construct
KTKLRSGSPHSKAQNQQT

SEQ ID NO: 4247 - protein, 18 aa, synthetic construct
KTRLRSGSPHSKAQNQQT

SEQ ID NO: 4248 - protein, 18 aa, synthetic construct
KWLLGSGSPHSKAQNQQT

SEQ ID NO: 4249 - protein, 18 aa, synthetic construct
KWSQGSGSPHSKAQNQQT

SEQ ID NO: 4250 - protein, 18 aa, synthetic construct
KWYLGSGSPHSKAQNQQT

SEQ ID NO: 4251 - protein, 18 aa, synthetic construct
KYHSGSGSPHSKAQNQQT

SEQ ID NO: 4252 - protein, 18 aa, synthetic construct
KYLPGSGSPHSKAQNQQT

SEQ ID NO: 4253 - protein, 18 aa, synthetic construct
KAINGGGSPHSKTQNQQT

SEQ ID NO: 4254 - protein, 18 aa, synthetic construct
KAINGHDSPHKRSPNQQT

SEQ ID NO: 4255 - protein, 18 aa, synthetic construct
KAINGHDSPHKSFSPQQT

SEQ ID NO: 4256 - protein, 18 aa, synthetic construct
KAINGHDSPHKSGENQQP

SEQ ID NO: 4257 - protein, 18 aa, synthetic construct
KAINGHDSPHKSGQLART

SEQ ID NO: 4258 - protein, 18 aa, synthetic construct
KAINGHDSPHKSGQNAFL

SEQ ID NO: 4259 - protein, 18 aa, synthetic construct
KAINGHDSPHKSGQNAYT

SEQ ID NO: 4260 - protein, 18 aa, synthetic construct
KAINGHDSPHKSGQNFAS

SEQ ID NO: 4261 - protein, 18 aa, synthetic construct
KAINGHDSPHKSGQNLAS

SEQ ID NO: 4262 - protein, 18 aa, synthetic construct
KAINGHDSPHKSGQNLGS

SEQ ID NO: 4263 - protein, 18 aa, synthetic construct
KAINGHDSPHKSGQNLKF

SEQ ID NO: 4264 - protein, 18 aa, synthetic construct
KAINGHDSPHKSGQNLLK

SEQ ID NO: 4265 - protein, 18 aa, synthetic construct
KAINGHDSPHKSGQNLSR

SEQ ID NO: 4266 - protein, 18 aa, synthetic construct
KAINGHDSPHKSGQNLSS

SEQ ID NO: 4267 - protein, 18 aa, synthetic construct
KAINGHDSPHKSGQNSLG

SEQ ID NO: 4268 - protein, 18 aa, synthetic construct
KAINGHDSPHKSGQNTLQ

SEQ ID NO: 4269 - protein, 18 aa, synthetic construct
KAINGHDSPHKSGQNTSL

SEQ ID NO: 4270 - protein, 18 aa, synthetic construct
KAINGHDSPHKSGQRLGT

SEQ ID NO: 4271 - protein, 18 aa, synthetic construct
KAINGHDSPHKSGQRNYT

SEQ ID NO: 4272 - protein, 18 aa, synthetic construct
KAINGHDSPHKSGQRPST

SEQ ID NO: 4273 - protein, 18 aa, synthetic construct
KAINGHDSPHKSGQRPVT

SEQ ID NO: 4274 - protein, 18 aa, synthetic construct
KAINGHDSPHKSGQVPST

SEQ ID NO: 4275 - protein, 18 aa, synthetic construct
KAINGHDSPHKSLSNQQT

SEQ ID NO: 4276 - protein, 18 aa, synthetic construct
KAINGHDSPHKSVLSQQT

SEQ ID NO: 4277 - protein, 18 aa, synthetic construct
KAINGHDSPHKTLQNQQT

SEQ ID NO: 4278 - protein, 18 aa, synthetic construct
KAINGHNSPHSKAQNQQT

SEQ ID NO: 4279 - protein, 18 aa, synthetic construct
KAINGLDSPHSKAQNQQT

SEQ ID NO: 4280 - protein, 18 aa, synthetic construct
KAINGSGSPHKSGQNQQT

SEQ ID NO: 4281 - protein, 18 aa, synthetic construct
KAINGSGSPHSKAQGQQT

SEQ ID NO: 4282 - protein, 18 aa, synthetic construct
KAINGSGSPHSKAQLSGT

SEQ ID NO: 4283 - protein, 18 aa, synthetic construct
KAINGSGSPHSKAQNGSL

SEQ ID NO: 4284 - protein, 18 aa, synthetic construct
KAINGSGSPHSKAQNSLL

SEQ ID NO: 4285 - protein, 18 aa, synthetic construct
KAINGSGSPHSKAVGLQT

SEQ ID NO: 4286 - protein, 18 aa, synthetic construct
KAINGSGSPHSKSLLQQT

SEQ ID NO: 4287 - protein, 18 aa, synthetic construct
KAINGSGSPHSKSLPQQT

SEQ ID NO: 4288 - protein, 18 aa, synthetic construct
KAINGSGSPHSKSTFQQT

SEQ ID NO: 4289 - protein, 18 aa, synthetic construct
KAITGHDSPHSKAQNQQT

SEQ ID NO: 4290 - protein, 18 aa, synthetic construct
KDVMGSGSPHSKAQNQQT

SEQ ID NO: 4291 - protein, 18 aa, synthetic construct
KEIVGSGSPHSKAQNQQT

SEQ ID NO: 4292 - protein, 18 aa, synthetic construct
KEIYGSGSPHSKAQNQQT

SEQ ID NO: 4293 - protein, 18 aa, synthetic construct
KELSGSGSPHSKAQNQQT

SEQ ID NO: 4294 - protein, 18 aa, synthetic construct
KETIGSGSPHSKAQNQQT

SEQ ID NO: 4295 - protein, 18 aa, synthetic construct
KEVLGSGSPHSKAQNQQT

SEQ ID NO: 4296 - protein, 18 aa, synthetic construct
KFALGHDSPHKSGQKQQT

SEQ ID NO: 4297 - protein, 18 aa, synthetic construct
KIINGHDSPHKSGQNLVL

SEQ ID NO: 4298 - protein, 18 aa, synthetic construct
KIINGHDSPHKSGQRNYT

SEQ ID NO: 4299 - protein, 18 aa, synthetic construct
KIINGHDSPHSKAQNQQT

SEQ ID NO: 4300 - protein, 18 aa, synthetic construct
KLNPGHDSPHKSGQTQQT

SEQ ID NO: 4301 - protein, 18 aa, synthetic construct
KLNRGHDSPHKSGQNQQS

SEQ ID NO: 4302 - protein, 18 aa, synthetic construct
KLSSGHDSPHKSGQNQQN

SEQ ID NO: 4303 - protein, 18 aa, synthetic construct
KNINGHDSPHSKAQNQQT

SEQ ID NO: 4304 - protein, 18 aa, synthetic construct
KNNDGSGSPHSKAQNQQT

SEQ ID NO: 4305 - protein, 18 aa, synthetic construct
KNVMGSGSPHSKAQNQQT

SEQ ID NO: 4306 - protein, 18 aa, synthetic construct
KPINGHDSPHKSGQNKLS

SEQ ID NO: 4307 - protein, 18 aa, synthetic construct
KPINGHDSPHKSGQNLSS

SEQ ID NO: 4308 - protein, 18 aa, synthetic construct
KPINGHDSPHSKAQNQQT

SEQ ID NO: 4309 - protein, 18 aa, synthetic construct
KRINGHDSPHSKAQNQQT

SEQ ID NO: 4310 - protein, 18 aa, synthetic construct
KSCSGHDSPHKSGQNQQS

SEQ ID NO: 4311 - protein, 18 aa, synthetic construct
KSINGHDSPHKSGQNLAS

SEQ ID NO: 4312 - protein, 18 aa, synthetic construct
KSINGHDSPHKSGQNLFL

SEQ ID NO: 4313 - protein, 18 aa, synthetic construct
KSINGHDSPHKSGQNLLM

SEQ ID NO: 4314 - protein, 18 aa, synthetic construct
KSINGHDSPHKSGQNLLQ

SEQ ID NO: 4315 - protein, 18 aa, synthetic construct
KSINGHDSPHKSGQNSLG

SEQ ID NO: 4316 - protein, 18 aa, synthetic construct
KSINGHDSPHKSGQNTLQ

SEQ ID NO: 4317 - protein, 18 aa, synthetic construct
KSINGHDSPHKSSSNQQT

SEQ ID NO: 4318 - protein, 18 aa, synthetic construct
KSINGHDSPHKYKLNQQT

SEQ ID NO: 4319 - protein, 18 aa, synthetic construct
KSINGSGSPHKSGQKQQT

SEQ ID NO: 4320 - protein, 18 aa, synthetic construct
KSINGSGSPHKSGQNQQT

SEQ ID NO: 4321 - protein, 18 aa, synthetic construct
KSINGSGSPHSKAQGLST

SEQ ID NO: 4322 - protein, 18 aa, synthetic construct
KSINGSGSPHSKAQLLGT

SEQ ID NO: 4323 - protein, 18 aa, synthetic construct
KSINGSGSPHSKTSWQQT

SEQ ID NO: 4324 - protein, 18 aa, synthetic construct
KSMNGHDSPHSKAQNQQT

SEQ ID NO: 4325 - protein, 18 aa, synthetic construct
KSTLGSGSPHSKAQNQHT

SEQ ID NO: 4326 - protein, 18 aa, synthetic construct
KSTLGSGSPHSKAQNQQN

SEQ ID NO: 4327 - protein, 18 aa, synthetic construct
KSTVGSGSPHSKAQTQQT

SEQ ID NO: 4328 - protein, 18 aa, synthetic construct
KTCKESGSPHSKAQNQQT

SEQ ID NO: 4329 - protein, 18 aa, synthetic construct
KTCKGSGSPHSKAQNQQT

SEQ ID NO: 4330 - protein, 18 aa, synthetic construct
KTCKSSGSPHSKAQNQQT

SEQ ID NO: 4331 - protein, 18 aa, synthetic construct
KTDMGSGSPHSKAQNQQT

SEQ ID NO: 4332 - protein, 18 aa, synthetic construct
KTDNGIGSPHSKAQNQQT

SEQ ID NO: 4333 - protein, 18 aa, synthetic construct
KTEGGSGSPHSKAQNQQT

SEQ ID NO: 4334 - protein, 18 aa, synthetic construct
KTEHHSGSPHSKAQNQQT

SEQ ID NO: 4335 - protein, 18 aa, synthetic construct
KTEKDSGSPHSKAQNQQT

SEQ ID NO: 4336 - protein, 18 aa, synthetic construct
KTELGHDSPHKRGQNQQT

SEQ ID NO: 4337 - protein, 18 aa, synthetic construct
KTESVSGSPHSKAQNQQT

SEQ ID NO: 4338 - protein, 18 aa, synthetic construct
KTETNSGSPHSKAQNQQT

SEQ ID NO: 4339 - protein, 18 aa, synthetic construct
KTETYSGSPHSKAQNQQT

SEQ ID NO: 4340 - protein, 18 aa, synthetic construct
KTEWLSGSPHSKAQNQQT

SEQ ID NO: 4341 - protein, 18 aa, synthetic construct
KTFNGSGSPHKSGQNQQT

SEQ ID NO: 4342 - protein, 18 aa, synthetic construct
KTGLRHDSPHKSGQKQQT

SEQ ID NO: 4343 - protein, 18 aa, synthetic construct
KTGLRHDSPHKSGQNQQS

SEQ ID NO: 4344 - protein, 18 aa, synthetic construct
KTGVTHDSPHKSGQKQQT

SEQ ID NO: 4345 - protein, 18 aa, synthetic construct
KTIDGHESPHSKAQNQQT

SEQ ID NO: 4346 - protein, 18 aa, synthetic construct
KTIEGHDSPHKSGQTQQT

SEQ ID NO: 4347 - protein, 18 aa, synthetic construct
KTIHGHDSPHSKAQNQQT

SEQ ID NO: 4348 - protein, 18 aa, synthetic construct
KTIHGHESPHSKAQNQQT

SEQ ID NO: 4349 - protein, 18 aa, synthetic construct
KTIIGHDSPHKSGQNRSS

SEQ ID NO: 4350 - protein, 18 aa, synthetic construct
KTIIGHDSPHKSGQRLGT

SEQ ID NO: 4351 - protein, 18 aa, synthetic construct
KTIIGSGSPHKSGQNQQT

SEQ ID NO: 4352 - protein, 18 aa, synthetic construct
KTIKGHDSPHKSGQNMLF

SEQ ID NO: 4353 - protein, 18 aa, synthetic construct
KTILGSGSPHSKAQNLQT

SEQ ID NO: 4354 - protein, 18 aa, synthetic construct
KTINGCSSPHWKAQNQQT

SEQ ID NO: 4355 - protein, 18 aa, synthetic construct
KTINGGGSTHSKAQNQQT

SEQ ID NO: 4356 - protein, 18 aa, synthetic construct
KTINGHDSPHKAGQSQQT

SEQ ID NO: 4357 - protein, 18 aa, synthetic construct
KTINGHDSPHKRGQNVPS

SEQ ID NO: 4358 - protein, 18 aa, synthetic construct
KTINGHDSPHKRGRSYQT

SEQ ID NO: 4359 - protein, 18 aa, synthetic construct
KTINGHDSPHKTGQNPPT

SEQ ID NO: 4360 - protein, 18 aa, synthetic construct
KTINGHDSPHSKAENQQT

SEQ ID NO: 4361 - protein, 18 aa, synthetic construct
KTINGHDSPHSKALSLQT

SEQ ID NO: 4362 - protein, 18 aa, synthetic construct
KTINGHDSPHSKAQGQQT

SEQ ID NO: 4363 - protein, 18 aa, synthetic construct
KTINGHDSPHSKAQHQQT

SEQ ID NO: 4364 - protein, 18 aa, synthetic construct
KTINGHDSPHSKAQIQQT

SEQ ID NO: 4365 - protein, 18 aa, synthetic construct
KTINGHDSPHSKAQKQQT

SEQ ID NO: 4366 - protein, 18 aa, synthetic construct
KTINGHDSPHSKAQNLSS

SEQ ID NO: 4367 - protein, 18 aa, synthetic construct
KTINGHDSPHSKAQNPQT

SEQ ID NO: 4368 - protein, 18 aa, synthetic construct
KTINGHDSPHSKAQNQET

SEQ ID NO: 4369 - protein, 18 aa, synthetic construct
KTINGHDSPHSKAQNQHT

SEQ ID NO: 4370 - protein, 18 aa, synthetic construct
KTINGHDSPHSKAQNQLT

SEQ ID NO: 4371 - protein, 18 aa, synthetic construct
KTINGHDSPHSKAQNQPT

SEQ ID NO: 4372 - protein, 18 aa, synthetic construct
KTINGHDSPHSKAQNQQA

SEQ ID NO: 4373 - protein, 18 aa, synthetic construct
KTINGHDSPHSKAQNTGS

SEQ ID NO: 4374 - protein, 18 aa, synthetic construct
KTINGHDSPHSKAQSQQT

SEQ ID NO: 4375 - protein, 18 aa, synthetic construct
KTINGHDSPHSKAQTQQT

SEQ ID NO: 4376 - protein, 18 aa, synthetic construct
KTINGHDSPHSKAQYQQT

SEQ ID NO: 4377 - protein, 18 aa, synthetic construct
KTINGHDSPHSKARNQQT

SEQ ID NO: 4378 - protein, 18 aa, synthetic construct
KTINGHDSPHSKLPGQQT

SEQ ID NO: 4379 - protein, 18 aa, synthetic construct
KTINGHDSPHSKSPNQQT

SEQ ID NO: 4380 - protein, 18 aa, synthetic construct
KTINGHESPHKSGQNAFL

SEQ ID NO: 4381 - protein, 18 aa, synthetic construct
KTINGIGSPHSKAPNEQT

SEQ ID NO: 4382 - protein, 18 aa, synthetic construct
KTINGQDSPHKSGQNLHM

SEQ ID NO: 4383 - protein, 18 aa, synthetic construct
KTINGRGSPHSKAQIGMT

SEQ ID NO: 4384 - protein, 18 aa, synthetic construct
KTINGRGSPHSKAQNQVL

SEQ ID NO: 4385 - protein, 18 aa, synthetic construct
KTINGRGSPHSKAQSPTT

SEQ ID NO: 4386 - protein, 18 aa, synthetic construct
KTINGRGSPHSKATSFQT

SEQ ID NO: 4387 - protein, 18 aa, synthetic construct
KTINGSGSPHFVVQNQQT

SEQ ID NO: 4388 - protein, 18 aa, synthetic construct
KTINGSGSPHKRGQKQQT

SEQ ID NO: 4389 - protein, 18 aa, synthetic construct
KTINGSGSPHKRGQNQET

SEQ ID NO: 4390 - protein, 18 aa, synthetic construct
KTINGSGSPHKRGQNQLT

SEQ ID NO: 4391 - protein, 18 aa, synthetic construct
KTINGSGSPHKRGRNQQT

SEQ ID NO: 4392 - protein, 18 aa, synthetic construct
KTINGSGSPHKSGGNQQT

SEQ ID NO: 4393 - protein, 18 aa, synthetic construct
KTINGSGSPHKSGHNQET

SEQ ID NO: 4394 - protein, 18 aa, synthetic construct
KTINGSGSPHKSGHNQLT

SEQ ID NO: 4395 - protein, 18 aa, synthetic construct
KTINGSGSPHKSGHNQQN

SEQ ID NO: 4396 - protein, 18 aa, synthetic construct
KTINGSGSPHKSGLNQLT

SEQ ID NO: 4397 - protein, 18 aa, synthetic construct
KTINGSGSPHKSGPNQQT

SEQ ID NO: 4398 - protein, 18 aa, synthetic construct
KTINGSGSPHKSGQGQQT

SEQ ID NO: 4399 - protein, 18 aa, synthetic construct
KTINGSGSPHKSGQHLQT

SEQ ID NO: 4400 - protein, 18 aa, synthetic construct
KTINGSGSPHKSGQHQQT

SEQ ID NO: 4401 - protein, 18 aa, synthetic construct
KTINGSGSPHKSGQKHQT

SEQ ID NO: 4402 - protein, 18 aa, synthetic construct
KTINGSGSPHKSGQKQQS

SEQ ID NO: 4403 - protein, 18 aa, synthetic construct
KTINGSGSPHKSGQNEQT

SEQ ID NO: 4404 - protein, 18 aa, synthetic construct
KTINGSGSPHKSGQNHQT

SEQ ID NO: 4405 - protein, 18 aa, synthetic construct
KTINGSGSPHKSGQNKQT

SEQ ID NO: 4406 - protein, 18 aa, synthetic construct
KTINGSGSPHKSGQNKTS

SEQ ID NO: 4407 - protein, 18 aa, synthetic construct
KTINGSGSPHKSGQNQEA

SEQ ID NO: 4408 - protein, 18 aa, synthetic construct
KTINGSGSPHKSGQNQET

SEQ ID NO: 4409 - protein, 18 aa, synthetic construct
KTINGSGSPHKSGQNQKT

SEQ ID NO: 4410 - protein, 18 aa, synthetic construct
KTINGSGSPHKSGQNQQI

SEQ ID NO: 4411 - protein, 18 aa, synthetic construct
KTINGSGSPHKSGQNQQR

SEQ ID NO: 4412 - protein, 18 aa, synthetic construct
KTINGSGSPHKSGQNQRT

SEQ ID NO: 4413 - protein, 18 aa, synthetic construct
KTINGSGSPHKSGQNQYT

SEQ ID NO: 4414 - protein, 18 aa, synthetic construct
KTINGSGSPHKSGQRQQT

SEQ ID NO: 4415 - protein, 18 aa, synthetic construct
KTINGSGSPHKSGQSQQT

SEQ ID NO: 4416 - protein, 18 aa, synthetic construct
KTINGSGSPHKSGQYQRT

SEQ ID NO: 4417 - protein, 18 aa, synthetic construct
KTINGSGSPHKSGRNQQA

SEQ ID NO: 4418 - protein, 18 aa, synthetic construct
KTINGSGSPHKSRHNQQT

SEQ ID NO: 4419 - protein, 18 aa, synthetic construct
KTINGSGSPHKSRQYQQT

SEQ ID NO: 4420 - protein, 18 aa, synthetic construct
KTINGSGSPHRKAQAPGT

SEQ ID NO: 4421 - protein, 18 aa, synthetic construct
KTINGSGSPHSKAAMKQT

SEQ ID NO: 4422 - protein, 18 aa, synthetic construct
KTINGSGSPHSKAGRQQT

SEQ ID NO: 4423 - protein, 18 aa, synthetic construct
KTINGSGSPHSKAGRTQT

SEQ ID NO: 4424 - protein, 18 aa, synthetic construct
KTINGSGSPHSKAKSNQT

SEQ ID NO: 4425 - protein, 18 aa, synthetic construct
KTINGSGSPHSKALKTQT

SEQ ID NO: 4426 - protein, 18 aa, synthetic construct
KTINGSGSPHSKAPRTQT

SEQ ID NO: 4427 - protein, 18 aa, synthetic construct
KTINGSGSPHSKAQAART

SEQ ID NO: 4428 - protein, 18 aa, synthetic construct
KTINGSGSPHSKAQAILT

SEQ ID NO: 4429 - protein, 18 aa, synthetic construct
KTINGSGSPHSKAQCRGT

SEQ ID NO: 4430 - protein, 18 aa, synthetic construct
KTINGSGSPHSKAQGLRT

SEQ ID NO: 4431 - protein, 18 aa, synthetic construct
KTINGSGSPHSKAQKGVL

SEQ ID NO: 4432 - protein, 18 aa, synthetic construct
KTINGSGSPHSKAQKSNT

SEQ ID NO: 4433 - protein, 18 aa, synthetic construct
KTINGSGSPHSKAQNNKF

SEQ ID NO: 4434 - protein, 18 aa, synthetic construct
KTINGSGSPHSKAQNRRT

SEQ ID NO: 4435 - protein, 18 aa, synthetic construct
KTINGSGSPHSKAQPKQT

SEQ ID NO: 4436 - protein, 18 aa, synthetic construct
KTINGSGSPHSKAQRAPT

SEQ ID NO: 4437 - protein, 18 aa, synthetic construct
KTINGSGSPHSKAQREHT

SEQ ID NO: 4438 - protein, 18 aa, synthetic construct
KTINGSGSPHSKAQRFGT

SEQ ID NO: 4439 - protein, 18 aa, synthetic construct
KTINGSGSPHSKAQRPCT

SEQ ID NO: 4440 - protein, 18 aa, synthetic construct
KTINGSGSPHSKAQRQAT

SEQ ID NO: 4441 - protein, 18 aa, synthetic construct
KTINGSGSPHSKAQRQPT

SEQ ID NO: 4442 - protein, 18 aa, synthetic construct
KTINGSGSPHSKAQTKLT

SEQ ID NO: 4443 - protein, 18 aa, synthetic construct
KTINGSGSPHSKAQTTHT

SEQ ID NO: 4444 - protein, 18 aa, synthetic construct
KTINGSGSPHSKAQVQRT

SEQ ID NO: 4445 - protein, 18 aa, synthetic construct
KTINGSGSPHSKAQVVRT

SEQ ID NO: 4446 - protein, 18 aa, synthetic construct
KTINGSGSPHSKAQWPNT

SEQ ID NO: 4447 - protein, 18 aa, synthetic construct
KTINGSGSPHSKAQYPST

SEQ ID NO: 4448 - protein, 18 aa, synthetic construct
KTINGSGSPHSKARALQT

SEQ ID NO: 4449 - protein, 18 aa, synthetic construct
KTINGSGSPHSKARDQHT

SEQ ID NO: 4450 - protein, 18 aa, synthetic construct
KTINGSGSPHSKARFQQT

SEQ ID NO: 4451 - protein, 18 aa, synthetic construct
KTINGSGSPHSKARRTQT

SEQ ID NO: 4452 - protein, 18 aa, synthetic construct
KTINGSGSPHSKARSLQT

SEQ ID NO: 4453 - protein, 18 aa, synthetic construct
KTINGSGSPHSKARVIQT

SEQ ID NO: 4454 - protein, 18 aa, synthetic construct
KTINGSGSPHSKAWYLQT

SEQ ID NO: 4455 - protein, 18 aa, synthetic construct
KTINGSGSPHSKGGGQQT

SEQ ID NO: 4456 - protein, 18 aa, synthetic construct
KTINGSGSPHSKGSRQQT

SEQ ID NO: 4457 - protein, 18 aa, synthetic construct
KTINGSGSPHSKLQRQQT

SEQ ID NO: 4458 - protein, 18 aa, synthetic construct
KTINGSGSPHSKMLRQQT

SEQ ID NO: 4459 - protein, 18 aa, synthetic construct
KTINGSGSPHSKSSIKQT

SEQ ID NO: 4460 - protein, 18 aa, synthetic construct
KTINGSGSPHSKVRFQQT

SEQ ID NO: 4461 - protein, 18 aa, synthetic construct
KTINGSGSPHSVVWNQQT

SEQ ID NO: 4462 - protein, 18 aa, synthetic construct
KTINGSTSPHKLAQNQQP

SEQ ID NO: 4463 - protein, 18 aa, synthetic construct
KTINRHDSPHKSGQRPST

SEQ ID NO: 4464 - protein, 18 aa, synthetic construct
KTINRIMSPHSKAQNQQT

SEQ ID NO: 4465 - protein, 18 aa, synthetic construct
KTINTARSPHSKAQNQQT

SEQ ID NO: 4466 - protein, 18 aa, synthetic construct
KTISGHDSPHSKAQNQQT

SEQ ID NO: 4467 - protein, 18 aa, synthetic construct
KTISGSGSPHKSGQNQQT

SEQ ID NO: 4468 - protein, 18 aa, synthetic construct
KTITGHDSPHKSGQRLGT

SEQ ID NO: 4469 - protein, 18 aa, synthetic construct
KTITGSGSPHKSGQNQQT

SEQ ID NO: 4470 - protein, 18 aa, synthetic construct
KTIYGHDSPHKSGQRLGT

SEQ ID NO: 4471 - protein, 18 aa, synthetic construct
KTLNGHDSPHKSGQNLFL

SEQ ID NO: 4472 - protein, 18 aa, synthetic construct
KTLNGHDSPHKSGQNLSS

SEQ ID NO: 4473 - protein, 18 aa, synthetic construct
KTLSFHDSPHKSGQNQQS

SEQ ID NO: 4474 - protein, 18 aa, synthetic construct
KTSNGSGSPHSKAQNTMT

SEQ ID NO: 4475 - protein, 18 aa, synthetic construct
KTTNGHDSPHSKAQNQQT

SEQ ID NO: 4476 - protein, 18 aa, synthetic construct
KTVNGGGSPHSKAQNQQT

SEQ ID NO: 4477 - protein, 18 aa, synthetic construct
KTVNGHDSPHKSGQNVSL

SEQ ID NO: 4478 - protein, 18 aa, synthetic construct
KTVNGHDSPHKSGQRPST

SEQ ID NO: 4479 - protein, 18 aa, synthetic construct
KTVNGHDSPHKSGQTQQA

SEQ ID NO: 4480 - protein, 18 aa, synthetic construct
KTVNGHESPHSKAQNQQT

SEQ ID NO: 4481 - protein, 18 aa, synthetic construct
KTVNGSGSPHSKAQGLST

SEQ ID NO: 4482 - protein, 18 aa, synthetic construct
KTVNGSGSPHSKAQNVTS

SEQ ID NO: 4483 - protein, 18 aa, synthetic construct
KTVPASGSPHSKAQNQQT

SEQ ID NO: 4484 - protein, 18 aa, synthetic construct
NTINGSGSPHSKAHNQQT

SEQ ID NO: 4485 - protein, 18 aa, synthetic construct
TTINGGGSPHSKAQNQQT

SEQ ID NO: 4486 - protein, 8 aa, synthetic construct
HDSPHSKA

SEQ ID NO: 4487-4534 - skipped (48 entries)

SEQ ID NO: 4535 - protein, 5 aa, synthetic construct
GGGGS

SEQ ID NO: 4536 - protein, 6 aa, synthetic construct
SGGGGS

SEQ ID NO: 4537 - protein, 15 aa, synthetic construct
GGGGSGGGGSGGGGS

SEQ ID NO: 4538 - protein, 25 aa, synthetic construct
GGGGSGGGGSGGGGSGGGGSGGGGS

SEQ ID NO: 4539 - protein, 10 aa, synthetic construct
GGGGSGGGGS

SEQ ID NO: 4540 - protein, 20 aa, synthetic construct
GGGGSGGGGSGGGGSGGGGS

SEQ ID NO: 4541 - protein, 30 aa, synthetic construct
GGGGSGGGGSGGGGSGGGGSGGGGSGGGGS

SEQ ID NO: 4542 - protein, 40 aa, synthetic construct
GGGGSGGGGSGGGGSGGGGSGGGGSGGGGSGGGGSGGGGS

SEQ ID NO: 4543 - DNA, 11 bp, synthetic construct
  source 1..11: mol_type = other DNA
gaggagccacc

SEQ ID NO: 4544-4672 - skipped (129 entries)

SEQ ID NO: 4673 - DNA, 23 bp, synthetic construct
  source 1..23: mol_type = other DNA
acaaacaccattgtcacactcca

SEQ ID NO: 4674 - DNA, 71 bp, synthetic construct
  source 1..71: mol_type = other DNA
acaaacaccattgtcacactccacacaaacaccattgtcacactccacacaaacaccattgtcacactcca

SEQ ID NO: 4675 - DNA, 23 bp, synthetic construct
  source 1..23: mol_type = other DNA
tccataaagtaggaaacactaca

SEQ ID NO: 4676 - DNA, 22 bp, synthetic construct
  source 1..22: mol_type = other DNA
agtgaattctaccagtgccata

SEQ ID NO: 4677 - DNA, 24 bp, synthetic construct
  source 1..24: mol_type = other DNA
agtgtgagttctaccattgccaaa

SEQ ID NO: 4678 - DNA, 23 bp, synthetic construct
  source 1..23: mol_type = other DNA
agcaaaaatgtgctagtgccaaa

SEQ ID NO: 4679 - DNA, 22 bp, synthetic construct
  source 1..22: mol_type = other DNA
atacatacttctttacattcca

SEQ ID NO: 4680-4696 - skipped (17 entries)

SEQ ID NO: 4697 - protein, 9 aa, synthetic construct
GSGSPHSKA

SEQ ID NO: 4698 - protein, 9 aa, synthetic construct
GHDSPHKSG

SEQ ID NO: 4699 - skipped

SEQ ID NO: 4700 - protein, 4 aa, synthetic construct
SPHS

SEQ ID NO: 4701 - protein, 5 aa, synthetic construct
SPHSK

SEQ ID NO: 4702 - protein, 4 aa, synthetic construct
HDSP

SEQ ID NO: 4703 - protein, 5 aa, synthetic construct
HDSPH

SEQ ID NO: 4704-5000 - skipped (297 entries)

SEQ ID NO: 5001 - protein, 120 aa, synthetic construct [sequence omitted]

SEQ ID NO: 5002 - DNA, 360 bp, synthetic construct
  source 1..360: mol_type = other DNA
gaggttcagctggtggagtctggcggtggcctggtgcagccagggggctcactccgtttgtcctgtgcagcttctggcttcaacattaaagacacctatatacactgggtgcgtcaggccccgggtaagggcctggaatgggttgcaaggatttatcctacgaatggttatactagatatgccgatagcgtcaagggccgtttcactataagcgcagacacatccaaaaacacagcctacctgcagatgaacagcctgcgtgctgaggacactgccgtctattattgttctagatggggaggggacggcttctatgctatggactactggggtcaaggaaccctggtcaccgtctcctcg

SEQ ID NO: 5003 - DNA, 993 bp, synthetic construct
  source 1..993: mol_type = other DNA
gcgtcgaccaagggcccatcggtcttccccctggcaccctcctccaagagcacctctgggggcacagcggccctgggctgcctggtcaaggactacttccccgaacctgtgacggtctcgtggaactcaggcgccctgaccagcggcgtgcacaccttcccggctgtcctacagtcctcaggactctactccctcagcagcgtggtgaccgtgccctccagcagcttgggcacccagacctacatctgcaacgtgaatcacaagcccagcaacaccaaggtggacaagaaagttgagccccccaaatcttgtgacaaaactcacacatgcccaccgtgcccagcacctgaactcctggggggaccgtcagtcttcctcttccccccaaaacccaaggacaccctcatgatctcccggacccctgaggtcacatgcgtggtggtggacgtgagccacgaagaccctgaggtcaagttcaactggtacgtggacggcgtggaggtgcataatgccaagacaaagccgcgggaggagcagtacaacagcacgtaccgtgtggtcagcgtcctcaccgtcctgcaccaggactggctgaatggcaaggagtacaagtgcaaggtctccaacaaagccctcccagcccccatcgagaaaaccatctccaaagccaaagggcagccccgagaaccacaggtgtacaccctgcccccatcccgggatgagctgaccaagaaccaggtcagcctgacctgcctggtcaaaggcttctatcccagcgacatcgccgtggagtgggagagcaatgggcagccggagaacaactacaagaccacgcctcccgtgctggactccgacggctccttcttcctctacagcaagctcaccgtggacaagagcaggtggcagcaggggaacgtcttctcatgctccgtgatgcatgaggctctgcacaaccactacacgcagaagagcctctccctgtctccgggtaaa

SEQ ID NO: 5004 - protein, 331 aa, synthetic construct
ASTKGPSVFPLAPSSKSTSGGTAALGCLVKDYFPEPVTVSWNSGALTSGVHTFPAVLQSSGLYSLSSVVTVPSSSLGTQTYICNVNHKPSNTKVDKKVEPPKSCDKTHTCPPCPAPELLGGPSVFLFPPKPKDTLMISRTPEVTCVVVDVSHEDPEVKFNWYVDGVEVHNAKTKPREEQYNSTYRVVSVLTVLHQDWLNGKEYKCKVSNKALPAPIEKTISKAKGQPREPQVYTLPPSRDELTKNQVSLTCLVKGFYPSDIAVEWESNGQPENNYKTTPPVLDSDGSFFLYSKLTVDKSRWQQGNVFSCSVMHEALHNHYTQKSLSLSPGK

SEQ ID NO: 5005 - DNA, 321 bp, synthetic construct
  source 1..321: mol_type = other DNA
gatatccagatgacccagtccccgagctccctgtccgcctctgtgggcgatagggtcaccatcacctgccgtgccagtcaggatgtgaatactgctgtagcctggtatcaacagaaaccaggaaaagctccgaaactactgatttactcggcatccttcctctactctggagtcccttctcgcttctctggatccagatctgggacggatttcactctgaccatcagcagtctgcagccggaagacttcgcaacttattactgtcagcaacattatactactcctcccacgttcggacagggtaccaaggtggagatcaaa

SEQ ID NO: 5006 - protein, 107 aa, synthetic construct [sequence omitted]

SEQ ID NO: 5007 - DNA, 321 bp, synthetic construct
  source 1..321: mol_type = other DNA
cgaactgtggctgcaccatctgtcttcatcttcccgccatctgatgagcagttgaaatctggaactgcctctgttgtgtgcctgctgaataacttctatcccagagaggccaaagtacagtggaaggtggataacgccctccaatcgggtaactcccaggagagtgtcacagagcaggacagcaaggacagcacctacagcctcagcagcaccctgacgctgagcaaagcagactacgagaaacacaaagtctacgcctgcgaagtcacccatcagggcctgagctcgcccgtcacaaagagcttcaacaggggagagtgt

SEQ ID NO: 5008 - protein, 107 aa, synthetic construct [sequence omitted]

SEQ ID NO: 5009 - DNA, 357 bp, synthetic construct
  source 1..357: mol_type = other DNA
gaggttcagctggtggagtctggcggtggcctggtgcagccagggggctcactccgtttgtcctgtgcagcttctggcttcaccttcaccgactataccatggattgggtgcgtcaggccccgggtaagggcctggaatgggttgcagacgtgaatcctaattctggtggttctatatataatcagcgtttcaagggccgtttcactctgagcgttgaccgttccaaaaacacactgtacctgcagatgaacagcctgcgtgctgaggacactgccgtctattattgtgcaagaaatctggggcctagcttctatttcgactactggggtcaaggaaccctggtcaccgtctcctcg

SEQ ID NO: 5010 - protein, 119 aa, synthetic construct [sequence omitted]

SEQ ID NO: 5011 - DNA, 990 bp, synthetic construct
  source 1..990: mol_type = other DNA
gcgtcgaccaagggcccatcggtcttccccctggcaccctcctccaagagcacctctgggggcacagcggccctgggctgcctggtcaaggactacttccccgaacctgtgacggtctcgtggaactcaggcgccctgaccagcggcgtgcacaccttcccggctgtcctacagtcctcaggactctactccctcagcagcgtggtgaccgtgccctccagcagcttgggcacccagacctacatctgcaacgtgaatcacaagcccagcaacaccaaggtggacaagaaagttgagcccaaatcttgtgacaaaactcacacatgcccaccgtgcccagcacctgaactcctggggggaccgtcagtcttcctcttccccccaaaacccaaggacaccctcatgatctcccggacccctgaggtcacatgcgtggtggtggacgtgagccacgaagaccctgaggtcaagttcaactggtacgtggacggcgtggaggtgcataatgccaagacaaagccgcgggaggagcagtacaacagcacgtaccgtgtggtcagcgtcctcaccgtcctgcaccaggactggctgaatggcaaggagtacaagtgcaaggtctccaacaaagccctcccagcccccatcgagaaaaccatctccaaagccaaagggcagccccgagaaccacaggtgtacaccctgcccccatcccgggaggagatgaccaagaaccaggtcagcctgacctgcctggtcaaaggcttctatcccagcgacatcgccgtggagtgggagagcaatgggcagccggagaacaactacaagaccacgcctcccgtgctggactccgacggctccttcttcctctacagcaagctcaccgtggacaagagcaggtggcagcaggggaacgtcttctcatgctccgtgatgcatgaggctctgcacaaccactacacgcagaagagcctctccctgtctccgggtaaa

SEQ ID NO: 5012 - protein, 330 aa, synthetic construct
ASTKGPSVFPLAPSSKSTSGGTAALGCLVKDYFPEPVTVSWNSGALTSGVHTFPAVLQSSGLYSLSSVVTVPSSSLGTQTYICNVNHKPSNTKVDKKVEPKSCDKTHTCPPCPAPELLGGPSVFLFPPKPKDTLMISRTPEVTCVVVDVSHEDPEVKFNWYVDGVEVHNAKTKPREEQYNSTYRVVSVLTVLHQDWLNGKEYKCKVSNKALPAPIEKTISKAKGQPREPQVYTLPPSREEMTKNQVSLTCLVKGFYPSDIAVEWESNGQPENNYKTTPPVLDSDGSFFLYSKLTVDKSRWQQGNVFSCSVMHEALHNHYTQKSLSLSPGK

SEQ ID NO: 5013 - DNA, 321 bp, synthetic construct
  source 1..321: mol_type = other DNA
gatatccagatgacccagtccccgagctccctgtccgcctctgtgggcgatagggtcaccatcacctgcaaagccagtcaggatgtgtccattggggtagcctggtatcaacagaaaccaggaaaagctccgaaactactgatttactcggcatcctatcgctacacgggagtcccttctcgcttctctggatccggttctgggacggatttcactctgaccatcagcagtctgcagccggaagacttcgcaacttattactgtcagcaatactatatctatccttacacgttcggacagggtaccaaggtggagatcaaa

SEQ ID NO: 5014 - protein, 107 aa, synthetic construct [sequence omitted]

SEQ ID NO: 5015 - DNA, 360 bp, synthetic construct
  source 1..360: mol_type = other DNA
caggtgcagctgcagcagagcggccccgagctggtgaagcccggcgccagcctgaagctgagctgcaccgccagcggcttcaacatcaaggacacctacatccactgggtgaagcagagacccgagcagggcctggagtggatcggcagaatctaccccaccaacggctacaccagatacgaccccaagttccaggacaaggccaccatcaccgccgacaccagcagcaacaccgcctacctgcaggtgagcagactgaccagcgaggacaccgccgtgtactactgcagcagatggggcggcgacggcttctacgccatggactactggggccagggcgccagcgtgaccgtgagcagc

SEQ ID NO: 5016 - protein, 120 aa, synthetic construct
QVQLQQSGPELVKPGASLKLSCTASGFNIKDTYIHWVKQRPEQGLEWIGRIYPTNGYTRYDPKFQDKATITADTSSNTAYLQVSRLTSEDTAVYYCSRWGGDGFYAMDYWGQGASVTVSS

SEQ ID NO: 5017 - DNA, 990 bp, synthetic construct
  source 1..990: mol_type = other DNA
gcgtcgaccaagggcccatcggtcttccccctggcaccctcctccaagagcacctctgggggcacagcggccctgggctgcctggtcaaggactacttccccgaacctgtgacggtctcgtggaactcaggcgccctgaccagcggcgtgcacaccttcccggctgtcctacagtcctcaggactctactccctcagcagcgtggtgaccgtgccctccagcagcttgggcacccagacctacatctgcaacgtgaatcacaagcccagcaacaccaaggtggacaagagagttgagcccaaatcttgtgacaaaactcacacatgcccaccgtgcccagcacctgaactcgtggggggaccgtcagtcttcctcctccccccaaaacccaaggacaccctcatgatctcccggacccctgaggtcacatgcgtggtggtggacgtgagccacgaagaccctgaggtcaagttcaactggtacgtggacggcgtggaggtgcataatgccaagacaaagccgccggaggagcagtacaacagcacgctccgtgtggtcagcgtcctcaccgtcctgcaccaggactggctgaatggcaaggagtacaagtgcaaggtctccaacaaagccctcccagcccccatcgagaaaaccatctccaaagccaaagggcagccccgagaaccacaggtgtacaccctgcccccatcccgggatgagctgaccaagaaccaggtcagcctgacctgcctggtcaaaggcttctatcccagcgacatcgccgtggagtgggagagcaatgggcagccggagaacaactacaagaccacgcctctcgtgctggactccgacggctccttcttcctctacagcaagctcaccgtggacaagagcaggtggcagcaggggaacgtcttctcatgctccgtgatgcatgaggctctgcacaaccactacacgcagaagagcctctccctgtctccgggtaaa

SEQ ID NO: 5018 - protein, 330 aa, synthetic construct
ASTKGPSVFPLAPSSKSTSGGTAALGCLVKDYFPEPVTVSWNSGALTSGVHTFPAVLQSSGLYSLSSVVTVPSSSLGTQTYICNVNHKPSNTKVDKRVEPKSCDKTHTCPPCPAPELVGGPSVFLLPPKPKDTLMISRTPEVTCVVVDVSHEDPEVKFNWYVDGVEVHNAKTKPPEEQYNSTLRVVSVLTVLHQDWLNGKEYKCKVSNKALPAPIEKTISKAKGQPREPQVYTLPPSRDELTKNQVSLTCLVKGFYPSDIAVEWESNGQPENNYKTTPLVLDSDGSFFLYSKLTVDKSRWQQGNVFSCSVMHEALHNHYTQKSLSLSPGK

SEQ ID NO: 5019 - DNA, 321 bp, synthetic construct
  source 1..321: mol_type = other DNA
gacatcgtgatgacccagagccacaagttcatgagcaccagcgtgggcgacagagtgagcatcacctgcaaggccagccaggacgtgaacaccgccgtggcctggtaccagcagaagcccggccacagccccaagctgctgatctacagcgccagcttcagatacaccggcgtgccggacagattcaccggcagcagaagcggcaccgacttcaccttcaccatcagcagcgtgcaggccgaggacctggccgtgtactactgccagcagcactacaccacccctcctaccttcggcggcggcaccaaggtggagatcaag

SEQ ID NO: 5020 - protein, 107 aa, synthetic construct
DIVMTQSHKFMSTSVGDRVSITCKASQDVNTAVAWYQQKPGHSPKLLIYSASFRYTGVPDRFTGSRSGTDFTFTISSVQAEDLAVYYCQQHYTTPPTFGGGTKVEIK

SEQ ID NO: 5021 - DNA, 322 bp, synthetic construct
  source 1..322: mol_type = other DNA
agaaccgtggccgcccctagcgtgttcatcttcccgccaagcgacgagcagctgaagagcggcaccgccagcgtggtgtgcctgctgaacaacttctaccccagagaggccaaggtgcagtggaaggtggacaacgccctgcagagcggcaacagccaggagagcgtgaccgagcaggacagcaaggacagcacctacagcctgagcagcaccctgaccctgagcaaggccgactacgagaagcacaaggtgtacgcctgcgaggtgacccaccagggcctgagcagccccgtgaccaagagcttcaacagaggcgagtgct

SEQ ID NO: 5022 - protein, 107 aa, synthetic construct [sequence omitted]

SEQ ID NO: 5023-5024 - skipped (2 entries)

SEQ ID NO: 5025 - DNA, 993 bp, synthetic construct
  source 1..993: mol_type = other DNA
gcgtcgaccaagggcccatcggtcttccccctggcaccctcctccaagagcacctctgggggcacagcggccctgggctgcctggtcaaggactacttccccgaacctgtgacggtctcgtggaactcaggcgccctgaccagcggcgtgcacaccttcccggctgtcctacagtcctcaggactctactccctcagcagcgtggtgaccgtgccctccagcagcttgggcacccagacctacatctgcaacgtgaatcacaagcccagcaacaccaaggtggacaagaaagttgagccccccaaatcttgtgacaaaactcacacatgcccaccgtgcccagcacctgaactcctggggggaccgtcagtcttcctcttccccccaaaacccaaggacaccctcatgatctcccggacccctgaggtcacatgcgtggtggtggacgtgagccacgaagaccctgaggtcaagttcaactggtacgtggacggcgtggaggtgcataatgccaagacaaagccgcgggaggagcagtacaacagcacgtaccgtgtggtcagcgtcctcaccgtcctgcaccaggactggctgaatggcaaggagtacaagtgcaaggtctccaacaaagccctcccagcccccatcgagaaaaccatctccaaagccaaagggcagccccgagaaccacaggtgtacaccctgcccccatcccgggatgagctgaccaagaaccaggtcagcctgacctgcctggtcaaaggcttctatcccagcgacatcgccgtggagtgggagagcaatgggcagccggagaacaactacaagaccacgcctcccgtgctggactccgacggctccttcttcctctacagcaagctcaccgtggacaagagcaggtggcagcaggggaacgtcttctcatgctccgtgatgcatgaggctctgcacaaccagtacacgcagaagagcctctccctgtctccgggtaaa

SEQ ID NO: 5026 - protein, 331 aa, synthetic construct
ASTKGPSVFPLAPSSKSTSGGTAALGCLVKDYFPEPVTVSWNSGALTSGVHTFPAVLQSSGLYSLSSVVTVPSSSLGTQTYICNVNHKPSNTKVDKKVEPPKSCDKTHTCPPCPAPELLGGPSVFLFPPKPKDTLMISRTPEVTCVVVDVSHEDPEVKFNWYVDGVEVHNAKTKPREEQYNSTYRVVSVLTVLHQDWLNGKEYKCKVSNKALPAPIEKTISKAKGQPREPQVYTLPPSRDELTKNQVSLTCLVKGFYPSDIAVEWESNGQPENNYKTTPPVLDSDGSFFLYSKLTVDKSRWQQGNVFSCSVMHEALHNQYTQKSLSLSPGK

SEQ ID NO: 5027-5028 - skipped (2 entries)

SEQ ID NO: 5029 - DNA, 993 bp, synthetic construct
  source 1..993: mol_type = other DNA
gcgtcgaccaagggcccatcggtcttccccctggcaccctcctccaagagcacctctgggggcacagcggccctgggctgcctggtcaaggactacttccccgaacctgtgacggtctcgtggaactcaggcgccctgaccagcggcgtgcacaccttcccggctgtcctacagtcctcaggactctactccctcagcagcgtggtgaccgtgccctccagcagcttgggcacccagacctacatctgcaacgtgaatcacaagcccagcaacaccaaggtggacaagaaagttgagccccccaaatcttgtgacaaaactcacacatgcccaccgtgcccagcacctgaactcctggggggaccgtcagtcttcctcttccccccaaaacccaaggacaccctcatggcatcccggacccctgaggtcacatgcgtggtggtggacgtgagccacgaagaccctgaggtcaagttcaactggtacgtggacggcgtggaggtgcataatgccaagacaaagccgcgggaggagcagtacaacagcacgtaccgtgtggtcagcgtcctcaccgtcctggcccaggactggctgaatggcaaggagtacaagtgcaaggtctccaacaaagccctcccagcccccatcgagaaaaccatctccaaagccaaagggcagccccgagaaccacaggtgtacaccctgcccccatcccgggatgagctgaccaagaaccaggtcagcctgacctgcctggtcaaaggcttctatcccagcgacatcgccgtggagtgggagagcaatgggcagccggagaacaactacaagaccacgcctcccgtgctggactccgacggctccttcttcctctacagcaagctcaccgtggacaagagcaggtggcagcaggggaacgtcttctcatgctccgtgatgcatgaggctctgcacaacgcttacacgcagaagagcctctccctgtctccgggtaaa

SEQ ID NO: 5030 - protein, 331 aa, synthetic construct
ASTKGPSVFPLAPSSKSTSGGTAALGCLVKDYFPEPVTVSWNSGALTSGVHTFPAVLQSSGLYSLSSVVTVPSSSLGTQTYICNVNHKPSNTKVDKKVEPPKSCDKTHTCPPCPAPELLGGPSVFLFPPKPKDTLMASRTPEVTCVVVDVSHEDPEVKFNWYVDGVEVHNAKTKPREEQYNSTYRVVSVLTVLAQDWLNGKEYKCKVSNKALPAPIEKTISKAKGQPREPQVYTLPPSRDELTKNQVSLTCLVKGFYPSDIAVEWESNGQPENNYKTTPPVLDSDGSFFLYSKLTVDKSRWQQGNVFSCSVMHEALHNAYTQKSLSLSPGK

SEQ ID NO: 5031 - skipped

SEQ ID NO: 5032 - DNA, 57 bp, synthetic construct
  source 1..57: mol_type = other DNA
atggactggacctggaggttcctctttgtggtggcagcagctacaggtgtccagtct

SEQ ID NO: 5033 - DNA, 1353 bp, synthetic construct
  source 1..1353: mol_type = other DNA
gaggttcagctggtggagtctggcggtggcctggtgcagccagggggctcactccgtttgtcctgtgcagcttctggcttcaacattaaagacacctatatacactgggtgcgtcaggccccgggtaagggcctggaatgggttgcaaggatttatcctacgaatggttatactagatatgccgatagcgtcaagggccgtttcactataagcgcagacacatccaaaaacacagcctacctgcagatgaacagcctgcgtgctgaggacactgccgtctattattgttctagatggggaggggacggcttctatgctatggactactggggtcaaggaaccctggtcaccgtctcctcggcgtcgaccaagggcccatcggtcttccccctggcaccctcctccaagagcacctctgggggcacagcggccctgggctgcctggtcaaggactacttccccgaacctgtgacggtctcgtggaactcaggcgccctgaccagcggcgtgcacaccttcccggctgtcctacagtcctcaggactctactccctcagcagcgtggtgaccgtgccctccagcagcttgggcacccagacctacatctgcaacgtgaatcacaagcccagcaacaccaaggtggacaagaaagttgagccccccaaatcttgtgacaaaactcacacatgcccaccgtgcccagcacctgaactcctggggggaccgtcagtcttcctcttccccccaaaacccaaggacaccctcatgatctcccggacccctgaggtcacatgcgtggtggtggacgtgagccacgaagaccctgaggtcaagttcaactggtacgtggacggcgtggaggtgcataatgccaagacaaagccgcgggaggagcagtacaacagcacgtaccgtgtggtcagcgtcctcaccgtcctgcaccaggactggctgaatggcaaggagtacaagtgcaaggtctccaacaaagccctcccagcccccatcgagaaaaccatctccaaagccaaagggcagccccgagaaccacaggtgtacaccctgcccccatcccgggatgagctgaccaagaaccaggtcagcctgacctgcctggtcaaaggcttctatcccagcgacatcgccgtggagtgggagagcaatgggcagccggagaacaactacaagaccacgcctcccgtgctggactccgacggctccttcttcctctacagcaagctcaccgtggacaagagcaggtggcagcaggggaacgtcttctcatgctccgtgatgcatgaggctctgcacaaccactacacgcagaagagcctctccctgtctccgggtaaa

SEQ ID NO: 5034 - protein, 451 aa, synthetic construct
EVQLVESGGGLVQPGGSLRLSCAASGFNIKDTYIHWVRQAPGKGLEWVARIYPTNGYTRYADSVKGRFTISADTSKNTAYLQMNSLRAEDTAVYYCSRWGGDGFYAMDYWGQGTLVTVSSASTKGPSVFPLAPSSKSTSGGTAALGCLVKDYFPEPVTVSWNSGALTSGVHTFPAVLQSSGLYSLSSVVTVPSSSLGTQTYICNVNHKPSNTKVDKKVEPPKSCDKTHTCPPCPAPELLGGPSVFLFPPKPKDTLMISRTPEVTCVVVDVSHEDPEVKFNWYVDGVEVHNAKTKPREEQYNSTYRVVSVLTVLHQDWLNGKEYKCKVSNKALPAPIEKTISKAKGQPREPQVYTLPPSRDELTKNQVSLTCLVKGFYPSDIAVEWESNGQPENNYKTTPPVLDSDGSFFLYSKLTVDKSRWQQGNVFSCSVMHEALHNHYTQKSLSLSPGK

SEQ ID NO: 5035 - DNA, 642 bp, synthetic construct
  source 1..642: mol_type = other DNA
gatatccagatgacccagtccccgagctccctgtccgcctctgtgggcgatagggtcaccatcacctgccgtgccagtcaggatgtgaatactgctgtagcctggtatcaacagaaaccaggaaaagctccgaaactactgatttactcggcatccttcctctactctggagtcccttctcgcttctctggatccagatctgggacggatttcactctgaccatcagcagtctgcagccggaagacttcgcaacttattactgtcagcaacattatactactcctcccacgttcggacagggtaccaaggtggagatcaaacgaactgtggctgcaccatctgtcttcatcttcccgccatctgatgagcagttgaaatctggaactgcctctgttgtgtgcctgctgaataacttctatcccagagaggccaaagtacagtggaaggtggataacgccctccaatcgggtaactcccaggagagtgtcacagagcaggacagcaaggacagcacctacagcctcagcagcaccctgacgctgagcaaagcagactacgagaaacacaaagtctacgcctgcgaagtcacccatcagggcctgagctcgcccgtcacaaagagcttcaacaggggagagtgt

SEQ ID NO: 5036 - protein, 214 aa, synthetic construct
DIQMTQSPSSLSASVGDRVTITCRASQDVNTAVAWYQQKPGKAPKLLIYSASFLYSGVPSRFSGSRSGTDFTLTISSLQPEDFATYYCQQHYTTPPTFGQGTKVEIKRTVAAPSVFIFPPSDEQLKSGTASVVCLLNNFYPREAKVQWKVDNALQSGNSQESVTEQDSKDSTYSLSSTLTLSKADYEKHKVYACEVTHQGLSSPVTKSFNRGEC

SEQ ID NO: 5037 - protein, 5 aa, synthetic construct
DTYIH

SEQ ID NO: 5038 - protein, 17 aa, synthetic construct
RIYPTNGYTRYADSVKG

SEQ ID NO: 5039 - protein, 11 aa, synthetic construct
WGGDGFYAMDY

SEQ ID NO: 5040 - protein, 7 aa, synthetic construct
GFNIKDT

SEQ ID NO: 5041 - protein, 6 aa, synthetic construct
YPTNGY

SEQ ID NO: 5042 - protein, 11 aa, synthetic construct
WGGDGFYAMDY

SEQ ID NO: 5043 - protein, 11 aa, synthetic construct
RASQDVNTAVA

SEQ ID NO: 5044 - protein, 7 aa, synthetic construct
SASFLYS

SEQ ID NO: 5045 - protein, 9 aa, synthetic construct
QQHYTTPPT

SEQ ID NO: 5046 - protein, 11 aa, synthetic construct
RASQDVNTAVA

SEQ ID NO: 5047 - protein, 7 aa, synthetic construct
SASFLYS

SEQ ID NO: 5048 - protein, 9 aa, synthetic construct
QQHYTTPPT

SEQ ID NO: 5049 - DNA, 1350 bp, synthetic construct
  source 1..1350: mol_type = other DNA
caggtgcagctgcagcagagcggccccgagctggtgaagcccggcgccagcctgaagctgagctgcaccgccagcggcttcaacatcaaggacacctacatccactgggtgaagcagagacccgagcagggcctggagtggatcggcagaatctaccccaccaacggctacaccagatacgaccccaagttccaggacaaggccaccatcaccgccgacaccagcagcaacaccgcctacctgcaggtgagcagactgaccagcgaggacaccgccgtgtactactgcagcagatggggcggcgacggcttctacgccatggactactggggccagggcgccagcgtgaccgtgagcagcgcgtcgaccaagggcccatcggtcttccccctggcaccctcctccaagagcacctctgggggcacagcggccctgggctgcctggtcaaggactacttccccgaacctgtgacggtctcgtggaactcaggcgccctgaccagcggcgtgcacaccttcccggctgtcctacagtcctcaggactctactccctcagcagcgtggtgaccgtgccctccagcagcttgggcacccagacctacatctgcaacgtgaatcacaagcccagcaacaccaaggtggacaagagagttgagcccaaatcttgtgacaaaactcacacatgcccaccgtgcccagcacctgaactcgtggggggaccgtcagtcttcctcctccccccaaaacccaaggacaccctcatgatctcccggacccctgaggtcacatgcgtggtggtggacgtgagccacgaagaccctgaggtcaagttcaactggtacgtggacggcgtggaggtgcataatgccaagacaaagccgccggaggagcagtacaacagcacgctccgtgtggtcagcgtcctcaccgtcctgcaccaggactggctgaatggcaaggagtacaagtgcaaggtctccaacaaagccctcccagcccccatcgagaaaaccatctccaaagccaaagggcagccccgagaaccacaggtgtacaccctgcccccatcccgggatgagctgaccaagaaccaggtcagcctgacctgcctggtcaaaggcttctatcccagcgacatcgccgtggagtgggagagcaatgggcagccggagaacaactacaagaccacgcctctcgtgctggactccgacggctccttcttcctctacagcaagctcaccgtggacaagagcaggtggcagcaggggaacgtcttctcatgctccgtgatgcatgaggctctgcacaaccactacacgcagaagagcctctccctgtctccgggtaaa

SEQ ID NO: 5050 - protein, 450 aa, synthetic construct
QVQLQQSGPELVKPGASLKLSCTASGFNIKDTYIHWVKQRPEQGLEWIGRIYPTNGYTRYDPKFQDKATITADTSSNTAYLQVSRLTSEDTAVYYCSRWGGDGFYAMDYWGQGASVTVSSASTKGPSVFPLAPSSKSTSGGTAALGCLVKDYFPEPVTVSWNSGALTSGVHTFPAVLQSSGLYSLSSVVTVPSSSLGTQTYICNVNHKPSNTKVDKRVEPKSCDKTHTCPPCPAPELVGGPSVFLLPPKPKDTLMISRTPEVTCVVVDVSHEDPEVKFNWYVDGVEVHNAKTKPPEEQYNSTLRVVSVLTVLHQDWLNGKEYKCKVSNKALPAPIEKTISKAKGQPREPQVYTLPPSRDELTKNQVSLTCLVKGFYPSDIAVEWESNGQPENNYKTTPLVLDSDGSFFLYSKLTVDKSRWQQGNVFSCSVMHEALHNHYTQKSLSLSPGK

SEQ ID NO: 5051 - DNA, 643 bp, synthetic construct
  source 1..643: mol_type = other DNA
gacatcgtgatgacccagagccacaagttcatgagcaccagcgtgggcgacagagtgagcatcacctgcaaggccagccaggacgtgaacaccgccgtggcctggtaccagcagaagcccggccacagccccaagctgctgatctacagcgccagcttcagatacaccggcgtgccggacagattcaccggcagcagaagcggcaccgacttcaccttcaccatcagcagcgtgcaggccgaggacctggccgtgtactactgccagcagcactacaccacccctcctaccttcggcggcggcaccaaggtggagatcaagagaaccgtggccgcccctagcgtgttcatcttcccgccaagcgacgagcagctgaagagcggcaccgccagcgtggtgtgcctgctgaacaacttctaccccagagaggccaaggtgcagtggaaggtggacaacgccctgcagagcggcaacagccaggagagcgtgaccgagcaggacagcaaggacagcacctacagcctgagcagcaccctgaccctgagcaaggccgactacgagaagcacaaggtgtacgcctgcgaggtgacccaccagggcctgagcagccccgtgaccaagagcttcaacagaggcgagtgct

SEQ ID NO: 5052 - protein, 214 aa, synthetic construct
DIVMTQSHKFMSTSVGDRVSITCKASQDVNTAVAWYQQKPGHSPKLLIYSASFRYTGVPDRFTGSRSGTDFTFTISSVQAEDLAVYYCQQHYTTPPTFGGGTKVEIKRTVAAPSVFIFPPSDEQLKSGTASVVCLLNNFYPREAKVQWKVDNALQSGNSQESVTEQDSKDSTYSLSSTLTLSKADYEKHKVYACEVTHQGLSSPVTKSFNRGEC

SEQ ID NO: 5053 - protein, 5 aa, synthetic construct
DTYIH

SEQ ID NO: 5054 - protein, 17 aa, synthetic construct
RIYPTNGYTRYDPKFQD

SEQ ID NO: 5055 - protein, 11 aa, synthetic construct
WGGDGFYAMDY

SEQ ID NO: 5056 - protein, 7 aa, synthetic construct
GFNIKDT

SEQ ID NO: 5057 - protein, 6 aa, synthetic construct
YPTNGY

SEQ ID NO: 5058 - protein, 11 aa, synthetic construct
WGGDGFYAMDY

SEQ ID NO: 5059 - protein, 11 aa, synthetic construct
KASQDVNTAVA

SEQ ID NO: 5060 - protein, 7 aa, synthetic construct
SASFRYT

SEQ ID NO: 5061 - protein, 9 aa, synthetic construct
QQHYTTPPT

SEQ ID NO: 5062 - protein, 11 aa, synthetic construct
KASQDVNTAVA

SEQ ID NO: 5063 - protein, 7 aa, synthetic construct
SASFRYT

SEQ ID NO: 5064 - protein, 9 aa, synthetic construct
QQHYTTPPT

SEQ ID NO: 5065 - DNA, 1347 bp, synthetic construct
  source 1..1347: mol_type = other DNA
gaggttcagctggtggagtctggcggtggcctggtgcagccagggggctcactccgtttgtcctgtgcagcttctggcttcaccttcaccgactataccatggattgggtgcgtcaggccccgggtaagggcctggaatgggttgcagacgtgaatcctaattctggtggttctatatataatcagcgtttcaagggccgtttcactctgagcgttgaccgttccaaaaacacactgtacctgcagatgaacagcctgcgtgctgaggacactgccgtctattattgtgcaagaaatctggggcctagcttctatttcgactactggggtcaaggaaccctggtcaccgtctcctcggcgtcgaccaagggcccatcggtcttccccctggcaccctcctccaagagcacctctgggggcacagcggccctgggctgcctggtcaaggactacttccccgaacctgtgacggtctcgtggaactcaggcgccctgaccagcggcgtgcacaccttcccggctgtcctacagtcctcaggactctactccctcagcagcgtggtgaccgtgccctccagcagcttgggcacccagacctacatctgcaacgtgaatcacaagcccagcaacaccaaggtggacaagaaagttgagcccaaatcttgtgacaaaactcacacatgcccaccgtgcccagcacctgaactcctggggggaccgtcagtcttcctcttccccccaaaacccaaggacaccctcatgatctcccggacccctgaggtcacatgcgtggtggtggacgtgagccacgaagaccctgaggtcaagttcaactggtacgtggacggcgtggaggtgcataatgccaagacaaagccgcgggaggagcagtacaacagcacgtaccgtgtggtcagcgtcctcaccgtcctgcaccaggactggctgaatggcaaggagtacaagtgcaaggtctccaacaaagccctcccagcccccatcgagaaaaccatctccaaagccaaagggcagccccgagaaccacaggtgtacaccctgcccccatcccgggaggagatgaccaagaaccaggtcagcctgacctgcctggtcaaaggcttctatcccagcgacatcgccgtggagtgggagagcaatgggcagccggagaacaactacaagaccacgcctcccgtgctggactccgacggctccttcttcctctacagcaagctcaccgtggacaagagcaggtggcagcaggggaacgtcttctcatgctccgtgatgcatgaggctctgcacaaccactacacgcagaagagcctctccctgtctccgggtaaa

SEQ ID NO: 5066 - protein, 449 aa, synthetic construct
EVQLVESGGGLVQPGGSLRLSCAASGFTFTDYTMDWVRQAPGKGLEWVADVNPNSGGSIYNQRFKGRFTLSVDRSKNTLYLQMNSLRAEDTAVYYCARNLGPSFYFDYWGQGTLVTVSSASTKGPSVFPLAPSSKSTSGGTAALGCLVKDYFPEPVTVSWNSGALTSGVHTFPAVLQSSGLYSLSSVVTVPSSSLGTQTYICNVNHKPSNTKVDKKVEPKSCDKTHTCPPCPAPELLGGPSVFLFPPKPKDTLMISRTPEVTCVVVDVSHEDPEVKFNWYVDGVEVHNAKTKPREEQYNSTYRVVSVLTVLHQDWLNGKEYKCKVSNKALPAPIEKTISKAKGQPREPQVYTLPPSREEMTKNQVSLTCLVKGFYPSDIAVEWESNGQPENNYKTTPPVLDSDGSFFLYSKLTVDKSRWQQGNVFSCSVMHEALHNHYTQKSLSLSPGK

SEQ ID NO: 5067 - DNA, 642 bp, synthetic construct
  source 1..642: mol_type = other DNA
gatatccagatgacccagtccccgagctccctgtccgcctctgtgggcgatagggtcaccatcacctgcaaagccagtcaggatgtgtccattggggtagcctggtatcaacagaaaccaggaaaagctccgaaactactgatttactcggcatcctatcgctacacgggagtcccttctcgcttctctggatccggttctgggacggatttcactctgaccatcagcagtctgcagccggaagacttcgcaacttattactgtcagcaatactatatctatccttacacgttcggacagggtaccaaggtggagatcaaacgaactgtggctgcaccatctgtcttcatcttcccgccatctgatgagcagttgaaatctggaactgcctctgttgtgtgcctgctgaataacttctatcccagagaggccaaagtacagtggaaggtggataacgccctccaatcgggtaactcccaggagagtgtcacagagcaggacagcaaggacagcacctacagcctcagcagcaccctgacgctgagcaaagcagactacgagaaacacaaagtctacgcctgcgaagtcacccatcagggcctgagctcgcccgtcacaaagagcttcaacaggggagagtgt

SEQ ID NO: 5068 - protein, 214 aa, synthetic construct
DIQMTQSPSSLSASVGDRVTITCKASQDVSIGVAWYQQKPGKAPKLLIYSASYRYTGVPSRFSGSGSGTDFTLTISSLQPEDFATYYCQQYYIYPYTFGQGTKVEIKRTVAAPSVFIFPPSDEQLKSGTASVVCLLNNFYPREAKVQWKVDNALQSGNSQESVTEQDSKDSTYSLSSTLTLSKADYEKHKVYACEVTHQGLSSPVTKSFNRGEC

SEQ ID NO: 5069 - protein, 120 aa, synthetic construct [sequence omitted]

SEQ ID NO: 5070 - DNA, 360 bp, synthetic construct; identical to SEQ ID NO: 5002
  source 1..360: mol_type = other DNA

SEQ ID NO: 5071 - protein, 5 aa, synthetic construct
DTYIH

SEQ ID NO: 5072 - protein, 17 aa, synthetic construct
RIYPTNGYTRYADSVKG

SEQ ID NO: 5073 - protein, 11 aa, synthetic construct
WGGDGFYAMDY

SEQ ID NO: 5074 - protein, 7 aa, synthetic construct
GFNIKDT

SEQ ID NO: 5075 - protein, 6 aa, synthetic construct
YPTNGY

SEQ ID NO: 5076 - protein, 11 aa, synthetic construct
WGGDGFYAMDY

SEQ ID NO: 5077 - protein, 11 aa, synthetic construct
RASQDVNTAVA

SEQ ID NO: 5078 - protein, 7 aa, synthetic construct
SASFLYS

SEQ ID NO: 5079 - protein, 9 aa, synthetic construct
QQHYTTPPT

SEQ ID NO: 5080 - protein, 11 aa, synthetic construct
RASQDVNTAVA

SEQ ID NO: 5081 - protein, 7 aa, synthetic construct
SASFLYS

SEQ ID NO: 5082 - protein, 9 aa, synthetic construct
QQHYTTPPT

SEQ ID NO: 5083 - DNA, 1353 bp, synthetic construct
  source 1..1353: mol_type = other DNA
gaggttcagctggtggagtctggcggtggcctggtgcagccagggggctcactccgtttgtcctgtgcagcttctggcttcaacattaaagacacctatatacactgggtgcgtcaggccccgggtaagggcctggaatgggttgcaaggatttatcctacgaatggttatactagatatgccgatagcgtcaagggccgtttcactataagcgcagacacatccaaaaacacagcctacctgcagatgaacagcctgcgtgctgaggacactgccgtctattattgttctagatggggaggggacggcttctatgctatggactactggggtcaaggaaccctggtcaccgtctcctcggcgtcgaccaagggcccatcggtcttccccctggcaccctcctccaagagcacctctgggggcacagcggccctgggctgcctggtcaaggactacttccccgaacctgtgacggtctcgtggaactcaggcgccctgaccagcggcgtgcacaccttcccggctgtcctacagtcctcaggactctactccctcagcagcgtggtgaccgtgccctccagcagcttgggcacccagacctacatctgcaacgtgaatcacaagcccagcaacaccaaggtggacaagaaagttgagccccccaaatcttgtgacaaaactcacacatgcccaccgtgcccagcacctgaactcctggggggaccgtcagtcttcctcttccccccaaaacccaaggacaccctcatgatctcccggacccctgaggtcacatgcgtggtggtggacgtgagccacgaagaccctgaggtcaagttcaactggtacgtggacggcgtggaggtgcataatgccaagacaaagccgcgggaggagcagtacaacagcacgtaccgtgtggtcagcgtcctcaccgtcctgcaccaggactggctgaatggcaaggagtacaagtgcaaggtctccaacaaagccctcccagcccccatcgagaaaaccatctccaaagccaaagggcagccccgagaaccacaggtgtacaccctgcccccatcccgggatgagctgaccaagaaccaggtcagcctgacctgcctggtcaaaggcttctatcccagcgacatcgccgtggagtgggagagcaatgggcagccggagaacaactacaagaccacgcctcccgtgctggactccgacggctccttcttcctctacagcaagctcaccgtggacaagagcaggtggcagcaggggaacgtcttctcatgctccgtgatgcatgaggctctgcacaaccagtacacgcagaagagcctctccctgtctccgggtaaa

SEQ ID NO: 5084 - protein, 451 aa, synthetic construct
EVQLVESGGGLVQPGGSLRLSCAASGFNIKDTYIHWVRQAPGKGLEWVARIYPTNGYTRYADSVKGRFTISADTSKNTAYLQMNSLRAEDTAVYYCSRWGGDGFYAMDYWGQGTLVTVSSASTKGPSVFPLAPSSKSTSGGTAALGCLVKDYFPEPVTVSWNSGALTSGVHTFPAVLQSSGLYSLSSVVTVPSSSLGTQTYICNVNHKPSNTKVDKKVEPPKSCDKTHTCPPCPAPELLGGPSVFLFPPKPKDTLMISRTPEVTCVVVDVSHEDPEVKFNWYVDGVEVHNAKTKPREEQYNSTYRVVSVLTVLHQDWLNGKEYKCKVSNKALPAPIEKTISKAKGQPREPQVYTLPPSRDELTKNQVSLTCLVKGFYPSDIAVEWESNGQPENNYKTTPPVLDSDGSFFLYSKLTVDKSRWQQGNVFSCSVMHEALHNQYTQKSLSLSPGK

SEQ ID NO: 5085 - DNA, 321 bp, synthetic construct; identical to SEQ ID NO: 5005
  source 1..321: mol_type = other DNA

SEQ ID NO: 5086 - protein, 107 aa, synthetic construct [sequence omitted]

SEQ ID NO: 5087 - DNA, 642 bp, synthetic construct; identical to SEQ ID NO: 5035
  source 1..642: mol_type = other DNA

SEQ ID NO: 5088 - protein, 214 aa, synthetic construct; identical to SEQ ID NO: 5036

SEQ ID NO: 5089 - DNA, 360 bp, synthetic construct; identical to SEQ ID NO: 5002
  source 1..360: mol_type = other DNA

SEQ ID NO: 5090 - protein, 120 aa, synthetic construct [sequence omitted]

SEQ ID NO: 5091 - DNA, 1353 bp, synthetic construct
  source 1..1353: mol_type = other DNA
gaggttcagctggtggagtctggcggtggcctggtgcagccagggggctcactccgtttgtcctgtgcagcttctggcttcaacattaaagacacctatatacactgggtgcgtcaggccccgggtaagggcctggaatgggttgcaaggatttatcctacgaatggttatactagatatgccgatagcgtcaagggccgtttcactataagcgcagacacatccaaaaacacagcctacctgcagatgaacagcctgcgtgctgaggacactgccgtctattattgttctagatggggaggggacggcttctatgctatggactactggggtcaaggaaccctggtcaccgtctcctcggcgtcgaccaagggcccatcggtcttccccctggcaccctcctccaagagcacctctgggggcacagcggccctgggctgcctggtcaaggactacttccccgaacctgtgacggtctcgtggaactcaggcgccctgaccagcggcgtgcacaccttcccggctgtcctacagtcctcaggactctactccctcagcagcgtggtgaccgtgccctccagcagcttgggcacccagacctacatctgcaacgtgaatcacaagcccagcaacaccaaggtggacaagaaagttgagccccccaaatcttgtgacaaaactcacacatgcccaccgtgcccagcacctgaactcctggggggaccgtcagtcttcctcttccccccaaaacccaaggacaccctcatggcatcccggacccctgaggtcacatgcgtggtggtggacgtgagccacgaagaccctgaggtcaagttcaactggtacgtggacggcgtggaggtgcataatgccaagacaaagccgcgggaggagcagtacaacagcacgtaccgtgtggtcagcgtcctcaccgtcctggcccaggactggctgaatggcaaggagtacaagtgcaaggtctccaacaaagccctcccagcccccatcgagaaaaccatctccaaagccaaagggcagccccgagaaccacaggtgtacaccctgcccccatcccgggatgagctgaccaagaaccaggtcagcctgacctgcctggtcaaaggcttctatcccagcgacatcgccgtggagtgggagagcaatgggcagccggagaacaactacaagaccacgcctcccgtgctggactccgacggctccttcttcctctacagcaagctcaccgtggacaagagcaggtggcagcaggggaacgtcttctcatgctccgtgatgcatgaggctctgcacaacgcttacacgcagaagagcctctccctgtctccgggtaaa

SEQ ID NO: 5092 - protein, 451 aa, synthetic construct
EVQLVESGGGLVQPGGSLRLSCAASGFNIKDTYIHWVRQAPGKGLEWVARIYPTNGYTRYADSVKGRFTISADTSKNTAYLQMNSLRAEDTAVYYCSRWGGDGFYAMDYWGQGTLVTVSSASTKGPSVFPLAPSSKSTSGGTAALGCLVKDYFPEPVTVSWNSGALTSGVHTFPAVLQSSGLYSLSSVVTVPSSSLGTQTYICNVNHKPSNTKVDKKVEPPKSCDKTHTCPPCPAPELLGGPSVFLFPPKPKDTLMASRTPEVTCVVVDVSHEDPEVKFNWYVDGVEVHNAKTKPREEQYNSTYRVVSVLTVLAQDWLNGKEYKCKVSNKALPAPIEKTISKAKGQPREPQVYTLPPSRDELTKNQVSLTCLVKGFYPSDIAVEWESNGQPENNYKTTPPVLDSDGSFFLYSKLTVDKSRWQQGNVFSCSVMHEALHNAYTQKSLSLSPGK

SEQ ID NO: 5093 - DNA, 321 bp, synthetic construct; identical to SEQ ID NO: 5005
  source 1..321: mol_type = other DNA

SEQ ID NO: 5094 - protein, 107 aa, synthetic construct [sequence omitted]

SEQ ID NO: 5095 - DNA, 642 bp, synthetic construct; identical to SEQ ID NO: 5035
  source 1..642: mol_type = other DNA

SEQ ID NO: 5096 - protein, 214 aa, synthetic construct; identical to SEQ ID NO: 5036

SEQ ID NO: 5097 - protein, 5 aa, synthetic construct
DTYIH

SEQ ID NO: 5098 - protein, 17 aa, synthetic construct
RIYPTNGYTRYADSVKG

SEQ ID NO: 5099 - protein, 11 aa, synthetic construct
WGGDGFYAMDY

SEQ ID NO: 5100 - protein, 7 aa, synthetic construct
GFNIKDT

SEQ ID NO: 5101 - protein, 6 aa, synthetic construct
YPTNGY

SEQ ID NO: 5102 - protein, 11 aa, synthetic construct
WGGDGFYAMDY

SEQ ID NO: 5103 - protein, 11 aa, synthetic construct
RASQDVNTAVA

SEQ ID NO: 5104 - protein, 7 aa, synthetic construct
SASFLYS

SEQ ID NO: 5105 - protein, 9 aa, synthetic construct
QQHYTTPPT

SEQ ID NO: 5106 - protein, 11 aa, synthetic construct
RASQDVNTAVA

SEQ ID NO: 5107 - protein, 7 aa, synthetic construct
SASFLYS

SEQ ID NO: 5108 - protein, 9 aa, synthetic construct
QQHYTTPPT

SEQ ID NO: 5109 - DNA, 360 bp, synthetic construct; identical to SEQ ID NO: 5002
  source 1..360: mol_type = other DNA

SEQ ID NO: 5110 - protein, 120 aa, synthetic construct [sequence omitted]

SEQ ID NO: 5111 - DNA, 1350 bp, synthetic construct
  source 1..1350: mol_type = other DNA
gaggttcagctggtggagtctggcggtggcctggtgcagccagggggctcactccgtttgtcctgtgcagcttctggcttcaacattaaagacacctatatacactgggtgcgtcaggccccgggtaagggcctggaatgggttgcaaggatttatcctacgaatggttatactagatatgccgatagcgtcaagggccgtttcactataagcgcagacacatccaaaaacacagcctacctgcagatgaacagcctgcgtgctgaggacactgccgtctattattgttctagatggggaggggacggcttctatgctatggactactggggtcaaggaaccctggtcaccgtctcctcggcgtcgaccaagggcccatcggtcttccccctggcaccctcctccaagagcacctctgggggcacagcggccctgggctgcctggtcaaggactacttccccgaacctgtgacggtctcgtggaactcaggcgccctgaccagcggcgtgcacaccttcccggctgtcctacagtcctcaggactctactccctcagcagcgtggtgaccgtgccctccagcagcttgggcacccagacctacatctgcaacgtgaatcacaagcccagcaacaccaaggtggacaagagagttgagcccaaatcttgtgacaaaactcacacatgcccaccgtgcccagcacctgaactcgtggggggaccgtcagtcttcctcctccccccaaaacccaaggacaccctcatgatctcccggacccctgaggtcacatgcgtggtggtggacgtgagccacgaagaccctgaggtcaagttcaactggtacgtggacggcgtggaggtgcataatgccaagacaaagccgccggaggagcagtacaacagcacgctccgtgtggtcagcgtcctcaccgtcctgcaccaggactggctgaatggcaaggagtacaagtgcaaggtctccaacaaagccctcccagcccccatcgagaaaaccatctccaaagccaaagggcagccccgagaaccacaggtgtacaccctgcccccatcccgggatgagctgaccaagaaccaggtcagcctgacctgcctggtcaaaggcttctatcccagcgacatcgccgtggagtgggagagcaatgggcagccggagaacaactacaagaccacgcctctcgtgctggactccgacggctccttcttcctctacagcaagctcaccgtggacaagagcaggtggcagcaggggaacgtcttctcatgctccgtgatgcatgaggctctgcacaaccactacacgcagaagagcctctccctgtctccgggtaaa

SEQ ID NO: 5112 - protein, 450 aa, synthetic construct
EVQLVESGGGLVQPGGSLRLSCAASGFNIKDTYIHWVRQAPGKGLEWVARIYPTNGYTRYADSVKGRFTISADTSKNTAYLQMNSLRAEDTAVYYCSRWGGDGFYAMDYWGQGTLVTVSSASTKGPSVFPLAPSSKSTSGGTAALGCLVKDYFPEPVTVSWNSGALTSGVHTFPAVLQSSGLYSLSSVVTVPSSSLGTQTYICNVNHKPSNTKVDKRVEPKSCDKTHTCPPCPAPELVGGPSVFLLPPKPKDTLMISRTPEVTCVVVDVSHEDPEVKFNWYVDGVEVHNAKTKPPEEQYNSTLRVVSVLTVLHQDWLNGKEYKCKVSNKALPAPIEKTISKAKGQPREPQVYTLPPSRDELTKNQVSLTCLVKGFYPSDIAVEWESNGQPENNYKTTPLVLDSDGSFFLYSKLTVDKSRWQQGNVFSCSVMHEALHNHYTQKSLSLSPGK

SEQ ID NO: 5113 - DNA, 321 bp, synthetic construct; identical to SEQ ID NO: 5005
  source 1..321: mol_type = other DNA

SEQ ID NO: 5114 - protein, 107 aa, synthetic construct [sequence omitted]

SEQ ID NO: 5115 - DNA, 642 bp, synthetic construct; identical to SEQ ID NO: 5035
  source 1..642: mol_type = other DNA

SEQ ID NO: 5116 - protein, 214 aa, synthetic construct; identical to SEQ ID NO: 5036

SEQ ID NO: 5117 - protein, 5 aa, synthetic construct
DTYIH

SEQ ID NO: 5118 - protein, 17 aa, synthetic construct
RIYPTNGYTRYADSVKG

SEQ ID NO: 5119 - protein, 11 aa, synthetic construct
WGGDGFYAMDY

SEQ ID NO: 5120 - protein, 7 aa, synthetic construct
GFNIKDT

SEQ ID NO: 5121 - protein, 6 aa, synthetic construct
YPTNGY

SEQ ID NO: 5122 - protein, 11 aa, synthetic construct
WGGDGFYAMDY

SEQ ID NO: 5123 - protein, 11 aa, synthetic construct
RASQDVNTAVA

SEQ ID NO: 5124 - protein, 7 aa, synthetic construct
SASFLYS

SEQ ID NO: 5125 - protein, 9 aa, synthetic construct
QQHYTTPPT

SEQ ID NO: 5126 - protein, 11 aa, synthetic construct
RASQDVNTAVA

SEQ ID NO: 5127 - protein, 7 aa, synthetic construct
SASFLYS

SEQ ID NO: 5128 - protein, 9 aa, synthetic construct
QQHYTTPPT

SEQ ID NO: 5129 - DNA, 360 bp, synthetic construct; identical to SEQ ID NO: 5015
  source 1..360: mol_type = other DNA

SEQ ID NO: 5130 - protein, 120 aa, synthetic construct; identical to SEQ ID NO: 5016

SEQ ID NO: 5131 - DNA, 1350 bp, synthetic construct; identical to SEQ ID NO: 5049
  source 1..1350: mol_type = other DNA

SEQ ID NO: 5132 - protein, 450 aa, synthetic construct; identical to SEQ ID NO: 5050

SEQ ID NO: 5133 - DNA, 321 bp, synthetic construct; identical to SEQ ID NO: 5019
  source 1..321: mol_type = other DNA

SEQ ID NO: 5134 - protein, 107 aa, synthetic construct; identical to SEQ ID NO: 5020

SEQ ID NO: 5135 - DNA, 643 bp, synthetic construct; identical to SEQ ID NO: 5051
  source 1..643: mol_type = other DNA

SEQ ID NO: 5136 - protein, 214 aa, synthetic construct; identical to SEQ ID NO: 5052

SEQ ID NO: 5137 - protein, 5 aa, synthetic construct
DTYIH

SEQ ID NO: 5138 - protein, 17 aa, synthetic construct
RIYPTNGYTRYDPKFQD

SEQ ID NO: 5139 - protein, 11 aa, synthetic construct
WGGDGFYAMDY

SEQ ID NO: 5140 - protein, 7 aa, synthetic construct
GFNIKDT

SEQ ID NO: 5141 - protein, 6 aa, synthetic construct
YPTNGY

SEQ ID NO: 5142 - protein, 11 aa, synthetic construct
WGGDGFYAMDY

SEQ ID NO: 5143 - protein, 11 aa, synthetic construct
KASQDVNTAVA

SEQ ID NO: 5144 - protein, 7 aa, synthetic construct
SASFRYT

SEQ ID NO: 5145 - protein, 9 aa, synthetic construct
QQHYTTPPT

SEQ ID NO: 5146 - protein, 11 aa, synthetic construct
KASQDVNTAVA

SEQ ID NO: 5147 - protein, 7 aa, synthetic construct
SASFRYT

SEQ ID NO: 5148 - protein, 9 aa, synthetic construct
QQHYTTPPT

SEQ ID NO: 5149 - protein, 5 aa, synthetic construct
DYTMD

SEQ ID NO: 5150 - protein, 17 aa, synthetic construct
DVNPNSGGSIYNQRFKG

SEQ ID NO: 5151 - protein, 11 aa, synthetic construct
NLGPSFYFDYW

SEQ ID NO: 5152 - protein, 11 aa, synthetic construct
KASQDVSIGVA

SEQ ID NO: 5153 - protein, 7 aa, synthetic construct
SASYRYT

SEQ ID NO: 5154 - protein, 9 aa, synthetic construct
QQYYIYPYT

SEQ ID NO: 5155 - DNA, 189 bp, synthetic construct
  source 1..189: mol_type = other DNA
ggcgtgaccctgttcgtggccctgtacgactacaccagctacaacaccagggacctgagcttccacaagggcgagaagttccagatcctgaggatggaggacggcgtgtggtgggaggccaggagcctgaccaccggcgagaccggctacatccccagcaactacgtggcccccgtggacagcatccag

SEQ ID NO: 5156 - protein, 63 aa, synthetic construct
GVTLFVALYDYTSYNTRDLSFHKGEKFQILRMEDGVWWEARSLTTGETGYIPSNYVAPVDSIQ

SEQ ID NO: 5157 - DNA, 57 bp, synthetic construct
  source 1..57: mol_type = other DNA
atggactggacctggaggttcctctttgtggtggcagcagctacaggtgtccagtcc

SEQ ID NO: 5158 - protein, 19 aa, synthetic construct
MDWTWRFLFVVAAATGVQS

SEQ ID NO: 5159 - DNA, 66 bp, synthetic construct
  source 1..66: mol_type = other DNA
atggacatgagggtccctgctcagctcctggggctcctgctgctctggctctcaggtgccagatgt

SEQ ID NO: 5160 - protein, 22 aa, synthetic construct
MDMRVPAQLLGLLLLWLSGARC

SEQ ID NO: 5161 - DNA, 15 bp, synthetic construct
  source 1..15: mol_type = other DNA
ggaggaggaggaagt

SEQ ID NO: 5162 - DNA, 15 bp, synthetic construct
  source 1..15: mol_type = other DNA
ggaggtggaggttct

SEQ ID NO: 5163 - DNA, 3992 bp, synthetic construct
  source 1..3992: mol_type = other DNA
ctgcgcgctcgctcgctcactgaggccgcccgggcaaagcccgggcgtcgggcgacctttggtcgcccggcctcagtgagcgagcgagcgcgcagagagggagtggccaactccatcactaggggttccttgtagttaatgattaacccgccatgctacttatctaccagggtaatggggatcctctagaactatagctagtcgacattgattattgactagttattaatagtaatcaattacggggtcattagttcatagcccatatatggagttccgcgttacataacttacggtaaatggcccgcctggctgaccgcccaacgacccccgcccattgacgtcaataatgacgtatgttcccatagtaacgccaatagggactttccattgacgtcaatgggtggagtatttacggtaaactgcccacttggcagtacatcaagtgtatcatatgccaagtacgccccctattgacgtcaatgacggtaaatggcccgcctggcattatgcccagtacatgaccttatgggactttcctacttggcagtacatctacgtattagtcatcgctattaccatgtcgaggccacgttctgcttcactctccccatctcccccccctccccacccccaattttgtatttatttattttttaattattttgtgcagcgatgggggcggggggggggggcgcgcgccaggcggggcggggcggggcgaggggcggggcggggcgaggcggagaggtgcggcggcagccaatcagagcggcgcgctccgaaagtttccttttatggcgaggcggcggcggcggcggccctataaaaagcgaagcgcgcggcgggcgggagcaagcttcgtttagtgaaccgtcagatcgcctggagacgccatccacgctgttttgacctccatagaagacaccgggaccgatccagcctccgcggattcgaatcccggccgggaacggtgcattggaacgcggattccccgtgccaagagtgacgtaagtaccgcctatagagtctataggcccacaaaaaatgctttcttcttttaatatacttttttgtttatcttatttctaatactttccctaatctctttctttcagggcaataatgatacaatgtatcatgcctctttgcaccattctaaagaataacagtgataatttctgggttaaggcaatagcaatatttctgcatataaatatttctgcatataaattgtaactgatgtaagaggtttcatattgctaatagcagctacaatccagctaccattctgcttttattttatggttgggataaggctggattattctgagtccaagctaggcccttttgctaatcatgttcatacctcttatcttcctcccacagctcctgggcaacgtgctggtctgtgtgctggcccatcactttggcaaagaattgggattcgaaccggtgccgccaccatggactggacctggaggttcctctttgtggtggcagcagctacaggtgtccagtccgaggttcagctggtggagtctggcggtggcctggtgcagccagggggctcactccgtttgtcctgtgcagcttctggcttcaacattaaagacacctatatacactgggtgcgtcaggccccgggtaagggcctggaatgggttgcaaggatttatcctacgaatggttatactagatatgccgatagcgtcaagggccgtttcactataagcgcagacacatccaaaaacacagcctacctgcagatgaacagcctgcgtgctgaggacactgccgtctattattgttctagatggggaggggacggcttctatgctatggactactggggtcaaggaaccctggtcaccgtctcctcggcgtcgaccaagggcccatcggtcttccccctggcaccctcctccaagagcacctctgggggcacagcggccctgggctgcctggtcaaggactacttccccgaacctgtgacggtctcgtggaactcaggcgccctgaccagcggcgtgcacaccttcccggctgtcctacagtcctcaggactctactccctcagcagcgtggtgaccgtgccctccagcagcttgggcacccagacctacatctgcaacgtgaatcacaagcccagcaacaccaaggtggacaagaaagttgagccccccaaatcttgtgacaaaactcacacatgcccaccgtgcccagcacctgaactcctggggggaccgtcagtcttcctcttccccccaaaacccaaggacaccctcatgatctcccggacccctgaggtcacatgcgtggtggtggacgtgagccacgaagaccctgaggtcaagttcaactggtacgtggacggcgtggaggtgcataatgccaagacaaagccgcgggaggagcagtacaacagcacgtaccgtgtggtcagcgtcctcaccgtcctgcaccaggactggctgaatggcaaggagtacaagtgcaaggtctccaacaaagccctcccagcccccatcgagaaaaccatctccaaagccaaagggcagccccgagaaccacaggtgtacaccctgcccccatcccgggatgagctgaccaagaaccaggtcagcctgacctgcctggtcaaaggcttctatcccagcgacatcgccgtggagtgggagagcaatgggcagccggagaacaactacaagaccacgcctcccgtgctggactccgacggctccttcttcctctacagcaagctcaccgtggacaagagcaggtggcagcaggggaacgtcttctcatgctccgtgatgcatgaggctctgcacaaccactacacgcagaagagcctctccctgtctccgggtaaaagaaagaggcgagagggcagaggaagtcttctaacatgcggtgacgtggaggagaatcccggccctatggacatgagggtccctgctcagctcctggggctcctgctgctctggctctcaggtgccagatgtgatatccagatgacccagtccccgagctccctgtccgcctctgtgggcgatagggtcaccatcacctgccgtgccagtcaggatgtgaatactgctgtagcctggtatcaacagaaaccaggaaaagctccgaaactactgatttactcggcatccttcctctactctggagtcccttctcgcttctctggatccagatctgggacggatttcactctgaccatcagcagtctgcagccggaagacttcgcaacttattactgtcagcaacattatactactcctcccacgttcggacagggtaccaaggtggagatcaaacgaactgtggctgcaccatctgtcttcatcttcccgccatctgatgagcagttgaaatctggaactgcctctgttgtgtgcctgctgaataacttctatcccagagaggccaaagtacagtggaaggtggataacgccctccaatcgggtaactcccaggagagtgtcacagagcaggacagcaaggacagcacctacagcctcagcagcaccctgacgctgagcaaagcagactacgagaaacacaaagtctacgcctgcgaagtcacccatcagggcctgagctcgcccgtcacaaagagcttcaacaggggagagtgttagtagtaactcgaggacggggtgaactacgcctgaggatccgatctttttccctctgccaaaaattatggggacatcatgaagccccttgagcatctgacttctggctaataaaggaaatttattttcattgcaatagtgtgttggaattttttgtgtctctcactcggcctaggtagataagtagcatggcgggttaatcattaactacaaggaacccctagtgatggagttggccactccctctctgcgcgctcgctcgctcactgaggccgggcgaccaaaggtcgcccgacgcccgggctttgcccgggcggcctcagtgagcgagcgagcgcgcag

SEQ ID NO: 5164 - DNA, 3989 bp, synthetic construct
  source 1..3989: mol_type = other DNA
ctgcgcgctcgctcgctcactgaggccgcccgggcaaagcccgggcgtcgggcgacctttggtcgcccggcctcagtgagcgagcgagcgcgcagagagggagtggccaactccatcactaggggttccttgtagttaatgattaacccgccatgctacttatctaccagggtaatggggatcctctagaactatagctagtcgacattgattattgactagttattaatagtaatcaattacggggtcattagttcatagcccatatatggagttccgcgttacataacttacggtaaatggcccgcctggctgaccgcccaacgacccccgcccattgacgtcaataatgacgtatgttcccatagtaacgccaatagggactttccattgacgtcaatgggtggagtatttacggtaaactgcccacttggcagtacatcaagtgtatcatatgccaagtacgccccctattgacgtcaatgacggtaaatggcccgcctggcattatgcccagtacatgaccttatgggactttcctacttggcagtacatctacgtattagtcatcgctattaccatgtcgaggccacgttctgcttcactctccccatctcccccccctccccacccccaattttgtatttatttattttttaattattttgtgcagcgatgggggcggggggggggggcgcgcgccaggcggggcggggcggggcgaggggcggggcggggcgaggcggagaggtgcggcggcagccaatcagagcggcgcgctccgaaagtttccttttatggcgaggcggcggcggcggcggccctataaaaagcgaagcgcgcggcgggcgggagcaagcttcgtttagtgaaccgtcagatcgcctggagacgccatccacgctgttttgacctccatagaagacaccgggaccgatccagcctccgcggattcgaatcccggccgggaacggtgcattggaacgcggattccccgtgccaagagtgacgtaagtaccgcctatagagtctataggcccacaaaaaatgctttcttcttttaatatacttttttgtttatcttatttctaatactttccctaatctctttctttcagggcaataatgatacaatgtatcatgcctctttgcaccattctaaagaataacagtgataatttctgggttaaggcaatagcaatatttctgcatataaatatttctgcatataaattgtaactgatgtaagaggtttcatattgctaatagcagctacaatccagctaccattctgcttttattttatggttgggataaggctggattattctgagtccaagctaggcccttttgctaatcatgttcatacctcttatcttcctcccacagctcctgggcaacgtgctggtctgtgtgctggcccatcactttggcaaagaattgggattcgaaccggtgccgccaccatggactggacctggaggttcctctttgtggtggcagcagctacaggtgtccagtcccaggtgcagctgcagcagagcggccccgagctggtgaagcccggcgccagcctgaagctgagctgcaccgccagcggcttcaacatcaaggacacctacatccactgggtgaagcagagacccgagcagggcctggagtggatcggcagaatctaccccaccaacggctacaccagatacgaccccaagttccaggacaaggccaccatcaccgccgacaccagcagcaacaccgcctacctgcaggtgagcagactgaccagcgaggacaccgccgtgtactactgcagcagatggggcggcgacggcttctacgccatggactactggggccagggcgccagcgtgaccgtgagcagcgcgtcgaccaagggcccatcggtcttccccctggcaccctcctccaagagcacctctgggggcacagcggccctgggctgcctggtcaaggactacttccccgaacctgtgacggtctcgtggaactcaggcgccctgaccagcggcgtgcacaccttcccggctgtcctacagtcctcaggactctactccctcagcagcgtggtgaccgtgccctccagcagcttgggcacccagacctacatctgcaacgtgaatcacaagcccagcaacaccaaggtggacaagagagttgagcccaaatcttgtgacaaaactcacacatgcccaccgtgcccagcacctgaactcgtggggggaccgtcagtcttcctcctccccccaaaacccaaggacaccctcatgatctcccggacccctgaggtcacatgcgtggtggtggacgtgagccacgaagaccctgaggtcaagttcaactggtacgtggacggcgtggaggtgcataatgccaagacaaagccgccggaggagcagtacaacagcacgctccgtgtggtcagcgtcctcaccgtcctgcaccaggactggctgaatggcaaggagtacaagtgcaaggtctccaacaaagccctcccagcccccatcgagaaaaccatctccaaagccaaagggcagccccgagaaccacaggtgtacaccctgcccccatcccgggatgagctgaccaagaaccaggtcagcctgacctgcctggtcaaaggcttctatcccagcgacatcgccgtggagtgggagagcaatgggcagccggagaacaactacaagaccacgcctctcgtgctggactccgacggctccttcttcctctacagcaagctcaccgtggacaagagcaggtggcagcaggggaacgtcttctcatgctccgtgatgcatgaggctctgcacaaccactacacgcagaagagcctctccctgtctccgggtaaaagaaagaggcgagagggcagaggaagtcttctaacatgcggtgacgtggaggagaatcccggccctatggacatgagggtccctgctcagctcctggggctcctgctgctctggctctcaggtgccagatgtgacatcgtgatgacccagagccacaagttcatgagcaccagcgtgggcgacagagtgagcatcacctgcaaggccagccaggacgtgaacaccgccgtggcctggtaccagcagaagcccggccacagccccaagctgctgatctacagcgccagcttcagatacaccggcgtgccggacagattcaccggcagcagaagcggcaccgacttcaccttcaccatcagcagcgtgcaggccgaggacctggccgtgtactactgccagcagcactacaccacccctcctaccttcggcggcggcaccaaggtggagatcaagagaaccgtggccgcccctagcgtgttcatcttcccgccaagcgacgagcagctgaagagcggcaccgccagcgtggtgtgcctgctgaacaacttctaccccagagaggccaaggtgcagtggaaggtggacaacgccctgcagagcggcaacagccaggagagcgtgaccgagcaggacagcaaggacagcacctacagcctgagcagcaccctgaccctgagcaaggccgactacgagaagcacaaggtgtacgcctgcgaggtgacccaccagggcctgagcagccccgtgaccaagagcttcaacagaggcgagtgctagtagtaactcgaggacggggtgaactacgcctgaggatccgatctttttccctctgccaaaaattatggggacatcatgaagccccttgagcatctgacttctggctaataaaggaaatttattttcattgcaatagtgtgttggaattttttgtgtctctcactcggcctaggtagataagtagcatggcgggttaatcattaactacaaggaacccctagtgatggagttggccactccctctctgcgcgctcgctcgctcactgaggccgggcgaccaaaggtcgcccgacgcccgggctttgcccgggcggcctcagtgagcgagcgagcgcgcag

SEQ ID NO: 5165 - DNA, 4220 bp, synthetic construct
  source 1..4220: mol_type = other DNA
ctgcgcgctcgctcgctcactgaggccgcccgggcaaagcccgggcgtcgggcgacctttggtcgcccggcctcagtgagcgagcgagcgcgcagagagggagtggccaactccatcactaggggttccttgtagttaatgattaacccgccatgctacttatctaccagggtaatggggatcctctagaactatagctagtcgacattgattattgactagttattaatagtaatcaattacggggtcattagttcatagcccatatatggagttccgcgttacataacttacggtaaatggcccgcctggctgaccgcccaacgacccccgcccattgacgtcaataatgacgtatgttcccatagtaacgccaatagggactttccattgacgtcaatgggtggagtatttacggtaaactgcccacttggcagtacatcaagtgtatcatatgccaagtacgccccctattgacgtcaatgacggtaaatggcccgcctggcattatgcccagtacatgaccttatgggactttcctacttggcagtacatctacgtattagtcatcgctattaccatgtcgaggccacgttctgcttcactctccccatctcccccccctccccacccccaattttgtatttatttattttttaattattttgtgcagcgatgggggcggggggggggggcgcgcgccaggcggggcggggcggggcgaggggcggggcggggcgaggcggagaggtgcggcggcagccaatcagagcggcgcgctccgaaagtttccttttatggcgaggcggcggcggcggcggccctataaaaagcgaagcgcgcggcgggcgggagcaagcttcgtttagtgaaccgtcagatcgcctggagacgccatccacgctgttttgacctccatagaagacaccgggaccgatccagcctccgcggattcgaatcccggccgggaacggtgcattggaacgcggattccccgtgccaagagtgacgtaagtaccgcctatagagtctataggcccacaaaaaatgctttcttcttttaatatacttttttgtttatcttatttctaatactttccctaatctctttctttcagggcaataatgatacaatgtatcatgcctctttgcaccattctaaagaataacagtgataatttctgggttaaggcaatagcaatatttctgcatataaatatttctgcatataaattgtaactgatgtaagaggtttcatattgctaatagcagctacaatccagctaccattctgcttttattttatggttgggataaggctggattattctgagtccaagctaggcccttttgctaatcatgttcatacctcttatcttcctcccacagctcctgggcaacgtgctggtctgtgtgctggcccatcactttggcaaagaattgggattcgaaccggtgccgccaccatggactggacctggaggttcctctttgtggtggcagcagctacaggtgtccagtccgaggttcagctggtggagtctggcggtggcctggtgcagccagggggctcactccgtttgtcctgtgcagcttctggcttcaccttcaccgactataccatggattgggtgcgtcaggccccgggtaagggcctggaatgggttgcagacgtgaatcctaattctggtggttctatatataatcagcgtttcaagggccgtttcactctgagcgttgaccgttccaaaaacacactgtacctgcagatgaacagcctgcgtgctgaggacactgccgtctattattgtgcaagaaatctggggcctagcttctatttcgactactggggtcaaggaaccctggtcaccgtctcctcggcgtcgaccaagggcccatcggtcttccccctggcaccctcctccaagagcacctctgggggcacagcggccctgggctgcctggtcaaggactacttccccgaacctgtgacggtctcgtggaactcaggcgccctgaccagcggcgtgcacaccttcccggctgtcctacagtcctcaggactctactccctcagcagcgtggtgaccgtgccctccagcagcttgggcacccagacctacatctgcaacgtgaatcacaagcccagcaacaccaaggtggacaagaaagttgagcccaaatcttgtgacaaaactcacacatgcccaccgtgcccagcacctgaactcctggggggaccgtcagtcttcctcttccccccaaaacccaaggacaccctcatgatctcccggacccctgaggtcacatgcgtggtggtggacgtgagccacgaagaccctgaggtcaagttcaactggtacgtggacggcgtggaggtgcataatgccaagacaaagccgcgggaggagcagtacaacagcacgtaccgtgtggtcagcgtcctcaccgtcctgcaccaggactggctgaatggcaaggagtacaagtgcaaggtctccaacaaagccctcccagcccccatcgagaaaaccatctccaaagccaaagggcagccccgagaaccacaggtgtacaccctgcccccatcccgggaggagatgaccaagaaccaggtcagcctgacctgcctggtcaaaggcttctatcccagcgacatcgccgtggagtgggagagcaatgggcagccggagaacaactacaagaccacgcctcccgtgctggactccgacggctccttcttcctctacagcaagctcaccgtggacaagagcaggtggcagcaggggaacgtcttctcatgctccgtgatgcatgaggctctgcacaaccactacacgcagaagagcctctccctgtctccgggtaaaagaaagaggcgagagggcagaggaagtcttctaacatgcggtgacgtggaggagaatcccggccctatggacatgagggtccctgctcagctcctggggctcctgctgctctggctctcaggtgccagatgtggcgtgaccctgttcgtggccctgtacgactacaccagctacaacaccagggacctgagcttccacaagggcgagaagttccagatcctgaggatggaggacggcgtgtggtgggaggccaggagcctgaccaccggcgagaccggctacatccccagcaactacgtggcccccgtggacagcatccagggtggtggtggatccggaggaggaggaagtggaggtggaggttctgatatccagatgacccagtccccgagctccctgtccgcctctgtgggcgatagggtcaccatcacctgcaaagccagtcaggatgtgtccattggggtagcctggtatcaacagaaaccaggaaaagctccgaaactactgatttactcggcatcctatcgctacacgggagtcccttctcgcttctctggatccggttctgggacggatttcactctgaccatcagcagtctgcagccggaagacttcgcaacttattactgtcagcaatactatatctatccttacacgttcggacagggtaccaaggtggagatcaaacgaactgtggctgcaccatctgtcttcatcttcccgccatctgatgagcagttgaaatctggaactgcctctgttgtgtgcctgctgaataacttctatcccagagaggccaaagtacagtggaaggtggataacgccctccaatcgggtaactcccaggagagtgtcacagagcaggacagcaaggacagcacctacagcctcagcagcaccctgacgctgagcaaagcagactacgagaaacacaaagtctacgcctgcgaagtcacccatcagggcctgagctcgcccgtcacaaagagcttcaacaggggagagtgttagtagtaactcgaggacggggtgaactacgcctgaggatccgatctttttccctctgccaaaaattatggggacatcatgaagccccttgagcatctgacttctggctaataaaggaaatttattttcattgcaatagtgtgttggaattttttgtgtctctcactcggcctaggtagataagtagcatggcgggttaatcattaactacaaggaacccctagtgatggagttggccactccctctctgcgcgctcgctcgctcactgaggccgggcgaccaaaggtcgcccgacgcccgggctttgcccgggcggcctcagtgagcgagcgagcgcgcag

SEQ ID NO: 5166 - DNA, 3992 bp, synthetic construct
  source 1..3992: mol_type = other DNA
ctgcgcgctcgctcgctcactgaggccgcccgggcaaagcccgggcgtcgggcgacctttggtcgcccggcctcagtgagcgagcgagcgcgcagagagggagtggccaactccatcactaggggttccttgtagttaatgattaacccgccatgctacttatctaccagggtaatggggatcctctagaactatagctagtcgacattgattattgactagttattaatagtaatcaattacggggtcattagttcatagcccatatatggagttccgcgttacataacttacggtaaatggcccgcctggctgaccgcccaacgacccccgcccattgacgtcaataatgacgtatgttcccatagtaacgccaatagggactttccattgacgtcaatgggtggagtatttacggtaaactgcccacttggcagtacatcaagtgtatcatatgccaagtacgccccctattgacgtcaatgacggtaaatggcccgcctggcattatgcccagtacatgaccttatgggactttcctacttggcagtacatctacgtattagtcatcgctattaccatgtcgaggccacgttctgcttcactctccccatctcccccccctccccacccccaattttgtatttatttattttttaattattttgtgcagcgatgggggcggggggggggggcgcgcgccaggcggggcggggcggggcgaggggcggggcggggcgaggcggagaggtgcggcggcagccaatcagagcggcgcgctccgaaagtttccttttatggcgaggcggcggcggcggcggccctataaaaagcgaagcgcgcggcgggcgggagcaagcttcgtttagtgaaccgtcagatcgcctggagacgccatccacgctgttttgacctccatagaagacaccgggaccgatccagcctccgcggattcgaatcccggccgggaacggtgcattggaacgcggattccccgtgccaagagtgacgtaagtaccgcctatagagtctataggcccacaaaaaatgctttcttcttttaatatacttttttgtttatcttatttctaatactttccctaatctctttctttcagggcaataatgatacaatgtatcatgcctctttgcaccattctaaagaataacagtgataatttctgggttaaggcaatagcaatatttctgcatataaatatttctgcatataaattgtaactgatgtaagaggtttcatattgctaatagcagctacaatccagctaccattctgcttttattttatggttgggataaggctggattattctgagtccaagctaggcccttttgctaatcatgttcatacctcttatcttcctcccacagctcctgggcaacgtgctggtctgtgtgctggcccatcactttggcaaagaattgggattcgaaccggtgccgccaccatggactggacctggaggttcctctttgtggtggcagcagctacaggtgtccagtccgaggttcagctggtggagtctggcggtggcctggtgcagccagggggctcactccgtttgtcctgtgcagcttctggcttcaacattaaagacacctatatacactgggtgcgtcaggccccgggtaagggcctggaatgggttgcaaggatttatcctacgaatggttatactagatatgccgatagcgtcaagggccgtttcactataagcgcagacacatccaaaaacacagcctacctgcagatgaacagcctgcgtgctgaggacactgccgtctattattgttctagatggggaggggacggcttctatgctatggactactggggtcaaggaaccctggtcaccgtctcctcggcgtcgaccaagggcccatcggtcttccccctggcaccctcctccaagagcacctctgggggcacagcggccctgggctgcctggtcaaggactacttccccgaacctgtgacggtctcgtggaactcaggcgccctgaccagcggcgtgcacaccttcccggctgtcctacagtcctcaggactctactccctcagcagcgtggtgaccgtgccctccagcagcttgggcacccagacctacatctgcaacgtgaatcacaagcccagcaacaccaaggtggacaagaaagttgagccccccaaatcttgtgacaaaactcacacatgcccaccgtgcccagcacctgaactcctggggggaccgtcagtcttcctcttccccccaaaacccaaggacaccctcatgatctcccggacccctgaggtcacatgcgtggtggtggacgtgagccacgaagaccctgaggtcaagttcaactggtacgtggacggcgtggaggtgcataatgccaagacaaagccgcgggaggagcagtacaacagcacgtaccgtgtggtcagcgtcctcaccgtcctgcaccaggactggctgaatggcaaggagtacaagtgcaaggtctccaacaaagccctcccagcccccatcgagaaaaccatctccaaagccaaagggcagccccgagaaccacaggtgtacaccctgcccccatcccgggatgagctgaccaagaaccaggtcagcctgacctgcctggtcaaaggcttctatcccagcgacatcgccgtggagtgggagagcaatgggcagccggagaacaactacaagaccacgcctcccgtgctggactccgacggctccttcttcctctacagcaagctcaccgtggacaagagcaggtggcagcaggggaacgtcttctcatgctccgtgatgcatgaggctctgcacaaccagtacacgcagaagagcctctccctgtctccgggtaaaagaaagaggcgagagggcagaggaagtcttctaacatgcggtgacgtggaggagaatcccggccctatggacatgagggtccctgctcagctcctggggctcctgctgctctggctctcaggtgccagatgtgatatccagatgacccagtccccgagctccctgtccgcctctgtgggcgatagggtcaccatcacctgccgtgccagtcaggatgtgaatactgctgtagcctggtatcaacagaaaccaggaaaagctccgaaactactgatttactcggcatccttcctctactctggagtcccttctcgcttctctggatccagatctgggacggatttcactctgaccatcagcagtctgcagccggaagacttcgcaacttattactgtcagcaacattatactactcctcccacgttcggacagggtaccaaggtggagatcaaacgaactgtggctgcaccatctgtcttcatcttcccgccatctgatgagcagttgaaatctggaactgcctctgttgtgtgcctgctgaataacttctatcccagagaggccaaagtacagtggaaggtggataacgccctccaatcgggtaactcccaggagagtgtcacagagcaggacagcaaggacagcacctacagcctcagcagcaccctgacgctgagcaaagcagactacgagaaacacaaagtctacgcctgcgaagtcacccatcagggcctgagctcgcccgtcacaaagagcttcaacaggggagagtgttagtagtaactcgaggacggggtgaactacgcctgaggatccgatctttttccctctgccaaaaattatggggacatcatgaagccccttgagcatctgacttctggctaataaaggaaatttattttcattgcaatagtgtgttggaattttttgtgtctctcactcggcctaggtagataagtagcatggcgggttaatcattaactacaaggaacccctagtgatggagttggccactccctctctgcgcgctcgctcgctcactgaggccgggcgaccaaaggtcgcccgacgcccgggctttgcccgggcggcctcagtgagcgagcgagcgcgcag

SEQ ID NO: 5167 - DNA, 3992 bp, synthetic construct
  source 1..3992: mol_type = other DNA
ctgcgcgctcgctcgctcactgaggccgcccgggcaaagcccgggcgtcgggcgacctttggtcgcccggcctcagtgagcgagcgagcgcgcagagagggagtggccaactccatcactaggggttccttgtagttaatgattaacccgccatgctacttatctaccagggtaatggggatcctctagaactatagctagtcgacattgattattgactagttattaatagtaatcaattacggggtcattagttcatagcccatatatggagttccgcgttacataacttacggtaaatggcccgcctggctgaccgcccaacgacccccgcccattgacgtcaataatgacgtatgttcccatagtaacgccaatagggactttccattgacgtcaatgggtggagtatttacggtaaactgcccacttggcagtacatcaagtgtatcatatgccaagtacgccccctattgacgtcaatgacggtaaatggcccgcctggcattatgcccagtacatgaccttatgggactttcctacttggcagtacatctacgtattagtcatcgctattaccatgtcgaggccacgttctgcttcactctccccatctcccccccctccccacccccaattttgtatttatttattttttaattattttgtgcagcgatgggggcggggggggggggcgcgcgccaggcggggcggggcggggcgaggggcggggcggggcgaggcggagaggtgcggcggcagccaatcagagcggcgcgctccgaaagtttccttttatggcgaggcggcggcggcggcggccctataaaaagcgaagcgcgcggcgggcgggagcaagcttcgtttagtgaaccgtcagatcgcctggagacgccatccacgctgttttgacctccatagaagacaccgggaccgatccagcctccgcggattcgaatcccggccgggaacggtgcattggaacgcggattccccgtgccaagagtgacgtaagtaccgcctatagagtctataggcccacaaaaaatgctttcttcttttaatatacttttttgtttatcttatttctaatactttccctaatctctttctttcagggcaataatgatacaatgtatcatgcctctttgcaccattctaaagaataacagtgataatttctgggttaaggcaatagcaatatttctgcatataaatatttctgcatataaattgtaactgatgtaagaggtttcatattgctaatagcagctacaatccagctaccattctgcttttattttatggttgggataaggctggattattctgagtccaagctaggcccttttgctaatcatgttcatacctcttatcttcctcccacagctcctgggcaacgtgctggtctgtgtgctggcccatcactttggcaaagaattgggattcgaaccggtgccgccaccatggactggacctggaggttcctctttgtggtggcagcagctacaggtgtccagtccgaggttcagctggtggagtctggcggtggcctggtgcagccagggggctcactccgtttgtcctgtgcagcttctggcttcaacattaaagacacctatatacactgggtgcgtcaggccccgggtaagggcctggaatgggttgcaaggatttatcctacgaatggttatactagatatgccgatagcgtcaagggccgtttcactataagcgcagacacatccaaaaacacagcctacctgcagatgaacagcctgcgtgctgaggacactgccgtctattattgttctagatggggaggggacggcttctatgctatggactactggggtcaaggaaccctggtcaccgtctcctcggcgtcgaccaagggcccatcggtcttccccctggcaccctcctccaagagcacctctgggggcacagcggccctgggctgcctggtcaaggactacttccccgaacctgtgacggtctcgtggaactcaggcgccctgaccagcggcgtgcacaccttcccggctgtcctacagtcctcaggactctactccctcagcagcgtggtgaccgtgccctccagcagcttgggcacccagacctacatctgcaacgtgaatcacaagcccagcaacaccaaggtggacaagaaagttgagccccccaaatcttgtgacaaaactcacacatgcccaccgtgcccagcacctgaactcctggggggaccgtcagtcttcctcttccccccaaaacccaaggacaccctcatggcatcccggacccctgaggtcacatgcgtggtggtggacgtgagccacgaagaccctgaggtcaagttcaactggtacgtggacggcgtggaggtgcataatgccaagacaaagccgcgggaggagcagtacaacagcacgtaccgtgtggtcagcgtcctcaccgtcctggcccaggactggctgaatggcaaggagtacaagtgcaaggtctccaacaaagccctcccagcccccatcgagaaaaccatctccaaagccaaagggcagccccgagaaccacaggtgtacaccctgcccccatcccgggatgagctgaccaagaaccaggtcagcctgacctgcctggtcaaaggcttctatcccagcgacatcgccgtggagtgggagagcaatgggcagccggagaacaactacaagaccacgcctcccgtgctggactccgacggctccttcttcctctacagcaagctcaccgtggacaagagcaggtggcagcaggggaacgtcttctcatgctccgtgatgcatgaggctctgcacaacgcttacacgcagaagagcctctccctgtctccgggtaaaagaaagaggcgagagggcagaggaagtcttctaacatgcggtgacgtggaggagaatcccggccctatggacatgagggtccctgctcagctcctggggctcctgctgctctggctctcaggtgccagatgtgatatccagatgacccagtccccgagctccctgtccgcctctgtgggcgatagggtcaccatcacctgccgtgccagtcaggatgtgaatactgctgtagcctggtatcaacagaaaccaggaaaagctccgaaactactgatttactcggcatccttcctctactctggagtcccttctcgcttctctggatccagatctgggacggatttcactctgaccatcagcagtctgcagccggaagacttcgcaacttattactgtcagcaacattatactactcctcccacgttcggacagggtaccaaggtggagatcaaacgaactgtggctgcaccatctgtcttcatcttcccgccatctgatgagcagttgaaatctggaactgcctctgttgtgtgcctgctgaataacttctatcccagagaggccaaagtacagtggaaggtggataacgccctccaatcgggtaactcccaggagagtgtcacagagcaggacagcaaggacagcacctacagcctcagcagcaccctgacgctgagcaaagcagactacgagaaacacaaagtctacgcctgcgaagtcacccatcagggcctgagctcgcccgtcacaaagagcttcaacaggggagagtgttagtagtaactcgaggacggggtgaactacgcctgaggatccgatctttttccctctgccaaaaattatggggacatcatgaagccccttgagcatctgacttctggctaataaaggaaatttattttcattgcaatagtgtgttggaattttttgtgtctctcactcggcctaggtagataagtagcatggcgggttaatcattaactacaaggaacccctagtgatggagttggccactccctctctgcgcgctcgctcgctcactgaggccgggcgaccaaaggtcgcccgacgcccgggctttgcccgggcggcctcagtgagcgagcgagcgcgcag

SEQ ID NO: 5168 - DNA, 3989 bp, synthetic construct
  source 1..3989: mol_type = other DNA
ctgcgcgctcgctcgctcactgaggccgcccgggcaaagcccgggcgtcgggcgacctttggtcgcccggcctcagtgagcgagcgagcgcgcagagagggagtggccaactccatcactaggggttccttgtagttaatgattaacccgccatgctacttatctaccagggtaatggggatcctctagaactatagctagtcgacattgattattgactagttattaatagtaatcaattacggggtcattagttcatagcccatatatggagttccgcgttacataacttacggtaaatggcccgcctggctgaccgcccaacgacccccgcccattgacgtcaataatgacgtatgttcccatagtaacgccaatagggactttccattgacgtcaatgggtggagtatttacggtaaactgcccacttggcagtacatcaagtgtatcatatgccaagtacgccccctattgacgtcaatgacggtaaatggcccgcctggcattatgcccagtacatgaccttatgggactttcctacttggcagtacatctacgtattagtcatcgctattaccatgtcgaggccacgttctgcttcactctccccatctcccccccctccccacccccaattttgtatttatttattttttaattattttgtgcagcgatgggggcggggggggggggcgcgcgccaggcggggcggggcggggcgaggggcggggcggggcgaggcggagaggtgcggcggcagccaatcagagcggcgcgctccgaaagtttccttttatggcgaggcggcggcggcggcggccctataaaaagcgaagcgcgcggcgggcgggagcaagcttcgtttagtgaaccgtcagatcgcctggagacgccatccacgctgttttgacctccatagaagacaccgggaccgatccagcctccgcggattcgaatcccggccgggaacggtgcattggaacgcggattccccgtgccaagagtgacgtaagtaccgcctatagagtctataggcccacaaaaaatgctttcttcttttaatatacttttttgtttatcttatttctaatactttccctaatctctttctttcagggcaataatgatacaatgtatcatgcctctttgcaccattctaaagaataacagtgataatttctgggttaaggcaatagcaatatttctgcatataaatatttctgcatataaattgtaactgatgtaagaggtttcatattgctaatagcagctacaatccagctaccattctgcttttattttatggttgggataaggctggattattctgagtccaagctaggcccttttgctaatcatgttcatacctcttatcttcctcccacagctcctgggcaacgtgctggtctgtgtgctggcccatcactttggcaaagaattgggattcgaaccggtgccgccaccatggactggacctggaggttcctctttgtggtggcagcagctacaggtgtccagtccgaggttcagctggtggagtctggcggtggcctggtgcagccagggggctcactccgtttgtcctgtgcagcttctggcttcaacattaaagacacctatatacactgggtgcgtcaggccccgggtaagggcctggaatgggttgcaaggatttatcctacgaatggttatactagatatgccgatagcgtcaagggccgtttcactataagcgcagacacatccaaaaacacagcctacctgcagatgaacagcctgcgtgctgaggacactgccgtctattattgttctagatggggaggggacggcttctatgctatggactactggggtcaaggaaccctggtcaccgtctcctcggcgtcgaccaagggcccatcggtcttccccctggcaccctcctccaagagcacctctgggggcacagcggccctgggctgcctggtcaaggactacttccccgaacctgtgacggtctcgtggaactcaggcgccctgaccagcggcgtgcacaccttcccggctgtcctacagtcctcaggactctactccctcagcagcgtggtgaccgtgccctccagcagcttgggcacccagacctacatctgcaacgtgaatcacaagcccagcaacaccaaggtggacaagagagttgagcccaaatcttgtgacaaaactcacacatgcccaccgtgcccagcacctgaactcgtggggggaccgtcagtcttcctcctccccccaaaacccaaggacaccctcatgatctcccggacccctgaggtcacatgcgtggtggtggacgtgagccacgaagaccctgaggtcaagttcaactggtacgtggacggcgtggaggtgcataatgccaagacaaagccgccggaggagcagtacaacagcacgctccgtgtggtcagcgtcctcaccgtcctgcaccaggactggctgaatggcaaggagtacaagtgcaaggtctccaacaaagccctcccagcccccatcgagaaaaccatctccaaagccaaagggcagccccgagaaccacaggtgtacaccctgcccccatcccgggatgagctgaccaagaaccaggtcagcctgacctgcctggtcaaaggcttctatcccagcgacatcgccgtggagtgggagagcaatgggcagccggagaacaactacaagaccacgcctctcgtgctggactccgacggctccttcttcctctacagcaagctcaccgtggacaagagcaggtggcagcaggggaacgtcttctcatgctccgtgatgcatgaggctctgcacaaccactacacgcagaagagcctctccctgtctccgggtaaaagaaagaggcgagagggcagaggaagtcttctaacatgcggtgacgtggaggagaatcccggccctatggacatgagggtccctgctcagctcctggggctcctgctgctctggctctcaggtgccagatgtgatatccagatgacccagtccccgagctccctgtccgcctctgtgggcgatagggtcaccatcacctgccgtgccagtcaggatgtgaatactgctgtagcctggtatcaacagaaaccaggaaaagctccgaaactactgatttactcggcatccttcctctactctggagtcccttctcgcttctctggatccagatctgggacggatttcactctgaccatcagcagtctgcagccggaagacttcgcaacttattactgtcagcaacattatactactcctcccacgttcggacagggtaccaaggtggagatcaaacgaactgtggctgcaccatctgtcttcatcttcccgccatctgatgagcagttgaaatctggaactgcctctgttgtgtgcctgctgaataacttctatcccagagaggccaaagtacagtggaaggtggataacgccctccaatcgggtaactcccaggagagtgtcacagagcaggacagcaaggacagcacctacagcctcagcagcaccctgacgctgagcaaagcagactacgagaaacacaaagtctacgcctgcgaagtcacccatcagggcctgagctcgcccgtcacaaagagcttcaacaggggagagtgttagtagtaactcgaggacggggtgaactacgcctgaggatccgatctttttccctctgccaaaaattatggggacatcatgaagccccttgagcatctgacttctggctaataaaggaaatttattttcattgcaatagtgtgttggaattttttgtgtctctcactcggcctaggtagataagtagcatggcgggttaatcattaactacaaggaacccctagtgatggagttggccactccctctctgcgcgctcgctcgctcactgaggccgggcgaccaaaggtcgcccgacgcccgggctttgcccgggcggcctcagtgagcgagcgagcgcgcag

SEQ ID NO: 5169 - DNA, 4047 bp, synthetic construct
  source 1..4047: mol_type = other DNA
ctgcgcgctcgctcgctcactgaggccgcccgggcaaagcccgggcgtcgggcgacctttggtcgcccggcctcagtgagcgagcgagcgcgcagagagggagtggccaactccatcactaggggttccttgtagttaatgattaacccgccatgctacttatctaccagggtaatggggatcctctagaactatagctagtcgacataacgcgtgatctaacatatcctggtgtggagtagcggacgctgctatgacagaggctcgggggcctgagctggctctgtgagctggggaggaggcagacagccaggccttgtctgcaagcagacctggcagcattgggctggccgccccccagggcctcctcttcatgcccagtgaatgactcaccttggcacagacacaatgttcggggtgggcacagtgcctgcttcccgccgcaccccagcccccctcaaatgccttccgagaagcccattgagcagggggcttgcattgcaccccagcctgacagcctggcatcttgggataaaagcagcacagccccctaggggctgcccttgctgtgtggcgccaccggcggtggagaacaaggctctattcagcctgtgcccaggaaaggggatcaggggatgcccaggcatggacagtgggtggcagggggggagaggagggctgtctgcttcccagaagtccaaggacacaaatgggtgaggggagagctctccccatagctgggctgcggcccaaccccaccccctcaggctatgccagggggtgttgccaggggcacccgggcatcgccagtctagcccactccttcataaagccctcgcatcccaggagcgagcagagccagagcaggttggagaggagacgcatcacctccgctgctcgcggggatcctctagaagcttcgtttagtgaaccgtcagatcgcctggagacgccatccacgctgttttgacctccatagaagacaccgggaccgatccagcctccgcggattcgaatcccggccgggaacggtgcattggaacgcggattccccgtgccaagagtgacgtaagtaccgcctatagagtctataggcccacaaaaaatgctttcttcttttaatatacttttttgtttatcttatttctaatactttccctaatctctttctttcagggcaataatgatacaatgtatcatgcctctttgcaccattctaaagaataacagtgataatttctgggttaaggcaatagcaatatttctgcatataaatatttctgcatataaattgtaactgatgtaagaggtttcatattgctaatagcagctacaatccagctaccattctgcttttattttatggttgggataaggctggattattctgagtccaagctaggcccttttgctaatcatgttcatacctcttatcttcctcccacagctcctgggcaacgtgctggtctgtgtgctggcccatcactttggcaaagaattgggattcgaaccggtgccgccaccatggactggacctggaggttcctctttgtggtggcagcagctacaggtgtccagtcccaggtgcagctgcagcagagcggccccgagctggtgaagcccggcgccagcctgaagctgagctgcaccgccagcggcttcaacatcaaggacacctacatccactgggtgaagcagagacccgagcagggcctggagtggatcggcagaatctaccccaccaacggctacaccagatacgaccccaagttccaggacaaggccaccatcaccgccgacaccagcagcaacaccgcctacctgcaggtgagcagactgaccagcgaggacaccgccgtgtactactgcagcagatggggcggcgacggcttctacgccatggactactggggccagggcgccagcgtgaccgtgagcagcgcgtcgaccaagggcccatcggtcttccccctggcaccctcctccaagagcacctctgggggcacagcggccctgggctgcctggtcaaggactacttccccgaacctgtgacggtctcgtggaactcaggcgccctgaccagcggcgtgcacaccttcccggctgtcctacagtcctcaggactctactccctcagcagcgtggtgaccgtgccctccagcagcttgggcacccagacctacatctgcaacgtgaatcacaagcccagcaacaccaaggtggacaagagagttgagcccaaatcttgtgacaaaactcacacatgcccaccgtgcccagcacctgaactcgtggggggaccgtcagtcttcctcctccccccaaaacccaaggacaccctcatgatctcccggacccctgaggtcacatgcgtggtggtggacgtgagccacgaagaccctgaggtcaagttcaactggtacgtggacggcgtggaggtgcataatgccaagacaaagccgccggaggagcagtacaacagcacgctccgtgtggtcagcgtcctcaccgtcctgcaccaggactggctgaatggcaaggagtacaagtgcaaggtctccaacaaagccctcccagcccccatcgagaaaaccatctccaaagccaaagggcagccccgagaaccacaggtgtacaccctgcccccatcccgggatgagctgaccaagaaccaggtcagcctgacctgcctggtcaaaggcttctatcccagcgacatcgccgtggagtgggagagcaatgggcagccggagaacaactacaagaccacgcctctcgtgctggactccgacggctccttcttcctctacagcaagctcaccgtggacaagagcaggtggcagcaggggaacgtcttctcatgctccgtgatgcatgaggctctgcacaaccactacacgcagaagagcctctccctgtctccgggtaaaagaaagaggcgagagggcagaggaagtcttctaacatgcggtgacgtggaggagaatcccggccctatggacatgagggtccctgctcagctcctggggctcctgctgctctggctctcaggtgccagatgtgacatcgtgatgacccagagccacaagttcatgagcaccagcgtgggcgacagagtgagcatcacctgcaaggccagccaggacgtgaacaccgccgtggcctggtaccagcagaagcccggccacagccccaagctgctgatctacagcgccagcttcagatacaccggcgtgccggacagattcaccggcagcagaagcggcaccgacttcaccttcaccatcagcagcgtgcaggccgaggacctggccgtgtactactgccagcagcactacaccacccctcctaccttcggcggcggcaccaaggtggagatcaagagaaccgtggccgcccctagcgtgttcatcttcccgccaagcgacgagcagctgaagagcggcaccgccagcgtggtgtgcctgctgaacaacttctaccccagagaggccaaggtgcagtggaaggtggacaacgccctgcagagcggcaacagccaggagagcgtgaccgagcaggacagcaaggacagcacctacagcctgagcagcaccctgaccctgagcaaggccgactacgagaagcacaaggtgtacgcctgcgaggtgacccaccagggcctgagcagccccgtgaccaagagcttcaacagaggcgagtgctagtagtaactcgaggacggggtgaactacgcctgaggatccgatctttttccctctgccaaaaattatggggacatcatgaagccccttgagcatctgacttctggctaataaaggaaatttattttcattgcaatagtgtgttggaattttttgtgtctctcactcggcctaggtagataagtagcatggcgggttaatcattaactacaaggaacccctagtgatggagttggccactccctctctgcgcgctcgctcgctcactgaggccgggcgaccaaaggtcgcccgacgcccgggctttgcccgggcggcctcagtgagcgagcgagcgcgcag

SEQ ID NO: 5170 - DNA, 3986 bp, synthetic construct
  source 1..3986: mol_type = other DNA
ctgcgcgctcgctcgctcactgaggccgcccgggcaaagcccgggcgtcgggcgacctttggtcgcccggcctcagtgagcgagcgagcgcgcagagagggagtggccaactccatcactaggggttccttgtagttaatgattaacccgccatgctacttatctaccagggtaatggggatcctctagaactatagctagtcgacattgattattgactagttattaatagtaatcaattacggggtcattagttcatagcccatatatggagttccgcgttacataacttacggtaaatggcccgcctggctgaccgcccaacgacccccgcccattgacgtcaataatgacgtatgttcccatagtaacgccaatagggactttccattgacgtcaatgggtggagtatttacggtaaactgcccacttggcagtacatcaagtgtatcatatgccaagtacgccccctattgacgtcaatgacggtaaatggcccgcctggcattatgcccagtacatgaccttatgggactttcctacttggcagtacatctacgtattagtcatcgctattaccatgtcgaggccacgttctgcttcactctccccatctcccccccctccccacccccaattttgtatttatttattttttaattattttgtgcagcgatgggggcggggggggggggcgcgcgccaggcggggcggggcggggcgaggggcggggcggggcgaggcggagaggtgcggcggcagccaatcagagcggcgcgctccgaaagtttccttttatggcgaggcggcggcggcggcggccctataaaaagcgaagcgcgcggcgggcgggagcaagcttcgtttagtgaaccgtcagatcgcctggagacgccatccacgctgttttgacctccatagaagacaccgggaccgatccagcctccgcggattcgaatcccggccgggaacggtgcattggaacgcggattccccgtgccaagagtgacgtaagtaccgcctatagagtctataggcccacaaaaaatgctttcttcttttaatatacttttttgtttatcttatttctaatactttccctaatctctttctttcagggcaataatgatacaatgtatcatgcctctttgcaccattctaaagaataacagtgataatttctgggttaaggcaatagcaatatttctgcatataaatatttctgcatataaattgtaactgatgtaagaggtttcatattgctaatagcagctacaatccagctaccattctgcttttattttatggttgggataaggctggattattctgagtccaagctaggcccttttgctaatcatgttcatacctcttatcttcctcccacagctcctgggcaacgtgctggtctgtgtgctggcccatcactttggcaaagaattgggattcgaaccggtgccgccaccatggactggacctggaggttcctctttgtggtggcagcagctacaggtgtccagtccgaggttcagctggtggagtctggcggtggcctggtgcagccagggggctcactccgtttgtcctgtgcagcttctggcttcaccttcaccgactataccatggattgggtgcgtcaggccccgggtaagggcctggaatgggttgcagacgtgaatcctaattctggtggttctatatataatcagcgtttcaagggccgtttcactctgagcgttgaccgttccaaaaacacactgtacctgcagatgaacagcctgcgtgctgaggacactgccgtctattattgtgcaagaaatctggggcctagcttctatttcgactactggggtcaaggaaccctggtcaccgtctcctcggcgtcgaccaagggcccatcggtcttccccctggcaccctcctccaagagcacctctgggggcacagcggccctgggctgcctggtcaaggactacttccccgaacctgtgacggtctcgtggaactcaggcgccctgaccagcggcgtgcacaccttcccggctgtcctacagtcctcaggactctactccctcagcagcgtggtgaccgtgccctccagcagcttgggcacccagacctacatctgcaacgtgaatcacaagcccagcaacaccaaggtggacaagaaagttgagcccaaatcttgtgacaaaactcacacatgcccaccgtgcccagcacctgaactcctggggggaccgtcagtcttcctcttccccccaaaacccaaggacaccctcatgatctcccggacccctgaggtcacatgcgtggtggtggacgtgagccacgaagaccctgaggtcaagttcaactggtacgtggacggcgtggaggtgcataatgccaagacaaagccgcgggaggagcagtacaacagcacgtaccgtgtggtcagcgtcctcaccgtcctgcaccaggactggctgaatggcaaggagtacaagtgcaaggtctccaacaaagccctcccagcccccatcgagaaaaccatctccaaagccaaagggcagccccgagaaccacaggtgtacaccctgcccccatcccgggaggagatgaccaagaaccaggtcagcctgacctgcctggtcaaaggcttctatcccagcgacatcgccgtggagtgggagagcaatgggcagccggagaacaactacaagaccacgcctcccgtgctggactccgacggctccttcttcctctacagcaagctcaccgtggacaagagcaggtggcagcaggggaacgtcttctcatgctccgtgatgcatgaggctctgcacaaccactacacgcagaagagcctctccctgtctccgggtaaaagaaagaggcgagagggcagaggaagtcttctaacatgcggtgacgtggaggagaatcccggccctatggacatgagggtccctgctcagctcctggggctcctgctgctctggctctcaggtgccagatgtgatatccagatgacccagtccccgagctccctgtccgcctctgtgggcgatagggtcaccatcacctgcaaagccagtcaggatgtgtccattggggtagcctggtatcaacagaaaccaggaaaagctccgaaactactgatttactcggcatcctatcgctacacgggagtcccttctcgcttctctggatccggttctgggacggatttcactctgaccatcagcagtctgcagccggaagacttcgcaacttattactgtcagcaatactatatctatccttacacgttcggacagggtaccaaggtggagatcaaacgaactgtggctgcaccatctgtcttcatcttcccgccatctgatgagcagttgaaatctggaactgcctctgttgtgtgcctgctgaataacttctatcccagagaggccaaagtacagtggaaggtggataacgccctccaatcgggtaactcccaggagagtgtcacagagcaggacagcaaggacagcacctacagcctcagcagcaccctgacgctgagcaaagcagactacgagaaacacaaagtctacgcctgcgaagtcacccatcagggcctgagctcgcccgtcacaaagagcttcaacaggggagagtgttagtagtaactcgaggacggggtgaactacgcctgaggatccgatctttttccctctgccaaaaattatggggacatcatgaagccccttgagcatctgacttctggctaataaaggaaatttattttcattgcaatagtgtgttggaattttttgtgtctctcactcggcctaggtagataagtagcatggcgggttaatcattaactacaaggaacccctagtgatggagttggccactccctctctgcgcgctcgctcgctcactgaggccgggcgaccaaaggtcgcccgacgcccgggctttgcccgggcggcctcagtgagcgagcgagcgcgcag

SEQ ID NO: 5171 - DNA, 357 bp, synthetic construct; identical to SEQ ID NO: 5009
  source 1..357: mol_type = other DNA

SEQ ID NO: 5172 - protein, 119 aa, synthetic construct [sequence omitted]

SEQ ID NO: 5173 - DNA, 1347 bp, synthetic construct; identical to SEQ ID NO: 5065
  source 1..1347: mol_type = other DNA

SEQ ID NO: 5174 - protein, 449 aa, synthetic construct; identical to SEQ ID NO: 5066

SEQ ID NO: 5175 - DNA, 321 bp, synthetic construct; identical to SEQ ID NO: 5013
  source 1..321: mol_type = other DNA

SEQ ID NO: 5176 - protein, 107 aa, synthetic construct [sequence omitted]

SEQ ID NO: 5177 - DNA, 642 bp, synthetic construct; identical to SEQ ID NO: 5067
  source 1..642: mol_type = other DNA

SEQ ID NO: 5178 - protein, 214 aa, synthetic construct; identical to SEQ ID NO: 5068

SEQ ID NO: 5179 - protein, 5 aa, synthetic construct
DYTMD

SEQ ID NO: 5180 - protein, 17 aa, synthetic construct
DVNPNSGGSIYNQRFKG

SEQ ID NO: 5181 - protein, 11 aa, synthetic construct
NLGPSFYFDYW

SEQ ID NO: 5182 - protein, 11 aa, synthetic construct
KASQDVSIGVA

SEQ ID NO: 5183 - protein, 7 aa, synthetic construct
SASYRYT

SEQ ID NO: 5184 - protein, 9 aa, synthetic construct
QQYYIYPYT

SEQ ID NO: 5185 - DNA, 3992 bp, synthetic construct
  source 1..3992: mol_type = other DNA
ctgcgcgctcgctcgctcactgaggccgcccgggcaaagcccgggcgtcgggcgacctttggtcgcccggcctcagtgagcgagcgagcgcgcagagagggagtggccaactccatcactaggggttccttgtagttaatgattaacccgccatgctacttatctaccagggtaatggggatcctctagaactatagctagtcgacattgattattgactagttattaatagtaatcaattacggggtcattagttcatagcccatatatggagttccgcgttacataacttacggtaaatggcccgcctggctgaccgcccaacgacccccgcccattgacgtcaataatgacgtatgttcccatagtaacgccaatagggactttccattgacgtcaatgggtggagtatttacggtaaactgcccacttggcagtacatcaagtgtatcatatgccaagtacgccccctattgacgtcaatgacggtaaatggcccgcctggcattatgcccagtacatgaccttatgggactttcctacttggcagtacatctacgtattagtcatcgctattaccatgtcgaggccacgttctgcttcactctccccatctcccccccctccccacccccaattttgtatttatttattttttaattattttgtgcagcgatgggggcggggggggggggcgcgcgccaggcggggcggggcggggcgaggggcggggcggggcgaggcggagaggtgcggcggcagccaatcagagcggcgcgctccgaaagtttccttttatggcgaggcggcggcggcggcggccctataaaaagcgaagcgcgcggcgggcgggagcaagcttcgtttagtgaaccgtcagatcgcctggagacgccatccacgctgttttgacctccatagaagacaccgggaccgatccagcctccgcggattcgaatcccggccgggaacggtgcattggaacgcggattccccgtgccaagagtgacgtaagtaccgcctatagagtctataggcccacaaaaaatgctttcttcttttaatatacttttttgtttatcttatttctaatactttccctaatctctttctttcagggcaataatgatacaatgtatcatgcctctttgcaccattctaaagaataacagtgataatttctgggttaaggcaatagcaatatttctgcatataaatatttctgcatataaattgtaactgatgtaagaggtttcatattgctaatagcagctacaatccagctaccattctgcttttattttatggttgggataaggctggattattctgagtccaagctaggcccttttgctaatcatgttcatacctcttatcttcctcccacagctcctgggcaacgtgctggtctgtgtgctggcccatcactttggcaaagaattgggattcgaaccggtgccgccaccatggactggacctggaggttcctctttgtggtggcagcagctacaggtgtccagtccgaggttcagctggtggagtctggcggtggcctggtgcagccagggggctcactccgtttgtcctgtgcagcttctggcttcaacattaaagacacctatatacactgggtgcgtcaggccccgggtaagggcctggaatgggttgcaaggatttatcctacgaatggttatactagatatgccgatagcgtcaagggccgtttcactataagcgcagacacatccaaaaacacagcctacctgcagatgaacagcctgcgtgctgaggacactgccgtctattattgttctagatggggaggggacggcttctatgctatggactactggggtcaaggaaccctggtcaccgtctcctcggcgtcgaccaagggcccatcggtcttccccctggcaccctcctccaagagcacctctgggggcacagcggccctgggctgcctggtcaaggactacttccccgaacctgtgacggtctcgtggaactcaggcgccctgaccagcggcgtgcacaccttcccggctgtcctacagtcctcaggactctactccctcagcagcgtggtgaccgtgccctccagcagcttgggcacccagacctacatctgcaacgtgaatcacaagcccagcaacaccaaggtggacaagaaagttgagccccccaaatcttgtgacaaaactcacacatgcccaccgtgcccagcacctgaactcctggggggaccgtcagtcttcctcttccccccaaaacccaaggacaccctcatggcatcccggacccctgaggtcacatgcgtggtggtggacgtgagccacgaagaccctgaggtcaagttcaactggtacgtggacggcgtggaggtgcataatgccaagacaaagccgcgggaggagcagtacaacagcacgtaccgtgtggtcagcgtcctcaccgtcctggcccaggactggctgaatggcaaggagtacaagtgcaaggtctccaacaaagccctcccagcccccatcgagaaaaccatctccaaagccaaagggcagccccgagaaccacaggtgtacaccctgcccccatcccgggatgagctgaccaagaaccaggtcagcctgacctgcctggtcaaaggcttctatcccagcgacatcgccgtggagtgggagagcaatgggcagccggagaacaactacaagaccacgcctcccgtgctggactccgacggctccttcttcctctacagcaagctcaccgtggacaagagcaggtggcagcaggggaacgtcttctcatgctccgtgatgcatgaggctctgcacaaccactacacgcagaagagcctctccctgtctccgggtaaaagaaagaggcgagagggcagaggaagtcttctaacatgcggtgacgtggaggagaatcccggccctatggacatgagggtccctgctcagctcctggggctcctgctgctctggctctcaggtgccagatgtgatatccagatgacccagtccccgagctccctgtccgcctctgtgggcgatagggtcaccatcacctgccgtgccagtcaggatgtgaatactgctgtagcctggtatcaacagaaaccaggaaaagctccgaaactactgatttactcggcatccttcctctactctggagtcccttctcgcttctctggatccagatctgggacggatttcactctgaccatcagcagtctgcagccggaagacttcgcaacttattactgtcagcaacattatactactcctcccacgttcggacagggtaccaaggtggagatcaaacgaactgtggctgcaccatctgtcttcatcttcccgccatctgatgagcagttgaaatctggaactgcctctgttgtgtgcctgctgaataacttctatcccagagaggccaaagtacagtggaaggtggataacgccctccaatcgggtaactcccaggagagtgtcacagagcaggacagcaaggacagcacctacagcctcagcagcaccctgacgctgagcaaagcagactacgagaaacacaaagtctacgcctgcgaagtcacccatcagggcctgagctcgcccgtcacaaagagcttcaacaggggagagtgttagtagtaactcgaggacggggtgaactacgcctgaggatccgatctttttccctctgccaaaaattatggggacatcatgaagccccttgagcatctgacttctggctaataaaggaaatttattttcattgcaatagtgtgttggaattttttgtgtctctcactcggcctaggtagataagtagcatggcgggttaatcattaactacaaggaacccctagtgatggagttggccactccctctctgcgcgctcgctcgctcactgaggccgggcgaccaaaggtcgcccgacgcccgggctttgcccgggcggcctcagtgagcgagcgagcgcgcag

SEQ ID NO: 5186 - DNA, 3992 bp, synthetic construct
  source 1..3992: mol_type = other DNA
ctgcgcgctcgctcgctcactgaggccgcccgggcaaagcccgggcgtcgggcgacctttggtcgcccggcctcagtgagcgagcgagcgcgcagagagggagtggccaactccatcactaggggttccttgtagttaatgattaacccgccatgctacttatctaccagggtaatggggatcctctagaactatagctagtcgacattgattattgactagttattaatagtaatcaattacggggtcattagttcatagcccatatatggagttccgcgttacataacttacggtaaatggcccgcctggctgaccgcccaacgacccccgcccattgacgtcaataatgacgtatgttcccatagtaacgccaatagggactttccattgacgtcaatgggtggagtatttacggtaaactgcccacttggcagtacatcaagtgtatcatatgccaagtacgccccctattgacgtcaatgacggtaaatggcccgcctggcattatgcccagtacatgaccttatgggactttcctacttggcagtacatctacgtattagtcatcgctattaccatgtcgaggccacgttctgcttcactctccccatctcccccccctccccacccccaattttgtatttatttattttttaattattttgtgcagcgatgggggcggggggggggggcgcgcgccaggcggggcggggcggggcgaggggcggggcggggcgaggcggagaggtgcggcggcagccaatcagagcggcgcgctccgaaagtttccttttatggcgaggcggcggcggcggcggccctataaaaagcgaagcgcgcggcgggcgggagcaagcttcgtttagtgaaccgtcagatcgcctggagacgccatccacgctgttttgacctccatagaagacaccgggaccgatccagcctccgcggattcgaatcccggccgggaacggtgcattggaacgcggattccccgtgccaagagtgacgtaagtaccgcctatagagtctataggcccacaaaaaatgctttcttcttttaatatacttttttgtttatcttatttctaatactttccctaatctctttctttcagggcaataatgatacaatgtatcatgcctctttgcaccattctaaagaataacagtgataatttctgggttaaggcaatagcaatatttctgcatataaatatttctgcatataaattgtaactgatgtaagaggtttcatattgctaatagcagctacaatccagctaccattctgcttttattttatggttgggataaggctggattattctgagtccaagctaggcccttttgctaatcatgttcatacctcttatcttcctcccacagctcctgggcaacgtgctggtctgtgtgctggcccatcactttggcaaagaattgggattcgaaccggtgccgccaccatggactggacctggaggttcctctttgtggtggcagcagctacaggtgtccagtccgaggttcagctggtggagtctggcggtggcctggtgcagccagggggctcactccgtttgtcctgtgcagcttctggcttcaacattaaagacacctatatacactgggtgcgtcaggccccgggtaagggcctggaatgggttgcaaggatttatcctacgaatggttatactagatatgccgatagcgtcaagggccgtttcactataagcgcagacacatccaaaaacacagcctacctgcagatgaacagcctgcgtgctgaggacactgccgtctattattgttctagatggggaggggacggcttctatgctatggactactggggtcaaggaaccctggtcaccgtctcctcggcgtcgaccaagggcccatcggtcttccccctggcaccctcctccaagagcacctctgggggcacagcggccctgggctgcctggtcaaggactacttccccgaacctgtgacggtctcgtggaactcaggcgccctgaccagcggcgtgcacaccttcccggctgtcctacagtcctcaggactctactccctcagcagcgtggtgaccgtgccctccagcagcttgggcacccagacctacatctgcaacgtgaatcacaagcccagcaacaccaaggtggacaagaaagttgagccccccaaatcttgtgacaaaactcacacatgcccaccgtgcccagcacctgaactcctggggggaccgtcagtcttcctcttccccccaaaacccaaggacaccctcatggcatcccggacccctgaggtcacatgcgtggtggtggacgtgagccacgaagaccctgaggtcaagttcaactggtacgtggacggcgtggaggtgcataatgccaagacaaagccgcgggaggagcagtacaacagcacgtaccgtgtggtcagcgtcctcaccgtcctgcaccaggactggctgaatggcaaggagtacaagtgcaaggtctccaacaaagccctcccagcccccatcgagaaaaccatctccaaagccaaagggcagccccgagaaccacaggtgtacaccctgcccccatcccgggatgagctgaccaagaaccaggtcagcctgacctgcctggtcaaaggcttctatcccagcgacatcgccgtggagtgggagagcaatgggcagccggagaacaactacaagaccacgcctcccgtgctggactccgacggctccttcttcctctacagcaagctcaccgtggacaagagcaggtggcagcaggggaacgtcttctcatgctccgtgatgcatgaggctctgcacaaccagtacacgcagaagagcctctccctgtctccgggtaaaagaaagaggcgagagggcagaggaagtcttctaacatgcggtgacgtggaggagaatcccggccctatggacatgagggtccctgctcagctcctggggctcctgctgctctggctctcaggtgccagatgtgatatccagatgacccagtccccgagctccctgtccgcctctgtgggcgatagggtcaccatcacctgccgtgccagtcaggatgtgaatactgctgtagcctggtatcaacagaaaccaggaaaagctccgaaactactgatttactcggcatccttcctctactctggagtcccttctcgcttctctggatccagatctgggacggatttcactctgaccatcagcagtctgcagccggaagacttcgcaacttattactgtcagcaacattatactactcctcccacgttcggacagggtaccaaggtggagatcaaacgaactgtggctgcaccatctgtcttcatcttcccgccatctgatgagcagttgaaatctggaactgcctctgttgtgtgcctgctgaataacttctatcccagagaggccaaagtacagtggaaggtggataacgccctccaatcgggtaactcccaggagagtgtcacagagcaggacagcaaggacagcacctacagcctcagcagcaccctgacgctgagcaaagcagactacgagaaacacaaagtctacgcctgcgaagtcacccatcagggcctgagctcgcccgtcacaaagagcttcaacaggggagagtgttagtagtaactcgaggacggggtgaactacgcctgaggatccgatctttttccctctgccaaaaattatggggacatcatgaagccccttgagcatctgacttctggctaataaaggaaatttattttcattgcaatagtgtgttggaattttttgtgtctctcactcggcctaggtagataagtagcatggcgggttaatcattaactacaaggaacccctagtgatggagttggccactccctctctgcgcgctcgctcgctcactgaggccgggcgaccaaaggtcgcccgacgcccgggctttgcccgggcggcctcagtgagcgagcgagcgcgcag

SEQ ID NO: 5187 - DNA, 3287 bp, synthetic construct
  source 1..3287: mol_type = other DNA
ctgcgcgctcgctcgctcactgaggccgcccgggcaaagcccgggcgtcgggcgacctttggtcgcccggcctcagtgagcgagcgagcgcgcagagagggagtggccaactccatcactaggggttccttgtagttaatgattaacccgccatgctacttatctaccagggtaatggggatcctctagaactatagctagtcgacattgattattgactagttattaatagtaatcaattacggggtcattagttcatagcccatatatggagttccgcgttacataacttacggtaaatggcccgcctggctgaccgcccaacgacccccgcccattgacgtcaataatgacgtatgttcccatagtaacgccaatagggactttccattgacgtcaatgggtggagtatttacggtaaactgcccacttggcagtacatcaagtgtatcatatgccaagtacgccccctattgacgtcaatgacggtaaatggcccgcctggcattatgcccagtacatgaccttatgggactttcctacttggcagtacatctacgtattagtcatcgctattaccatgtcgaggccacgttctgcttcactctccccatctcccccccctccccacccccaattttgtatttatttattttttaattattttgtgcagcgatgggggcggggggggggggcgcgcgccaggcggggcggggcggggcgaggggcggggcggggcgaggcggagaggtgcggcggcagccaatcagagcggcgcgctccgaaagtttccttttatggcgaggcggcggcggcggcggccctataaaaagcgaagcgcgcggcgggcgggagcaagcttcgtttagtgaaccgtcagatcgcctggagacgccatccacgctgttttgacctccatagaagacaccgggaccgatccagcctccgcggattcgaatcccggccgggaacggtgcattggaacgcggattccccgtgccaagagtgacgtaagtaccgcctatagagtctataggcccacaaaaaatgctttcttcttttaatatacttttttgtttatcttatttctaatactttccctaatctctttctttcagggcaataatgatacaatgtatcatgcctctttgcaccattctaaagaataacagtgataatttctgggttaaggcaatagcaatatttctgcatataaatatttctgcatataaattgtaactgatgtaagaggtttcatattgctaatagcagctacaatccagctaccattctgcttttattttatggttgggataaggctggattattctgagtccaagctaggcccttttgctaatcatgttcatacctcttatcttcctcccacagctcctgggcaacgtgctggtctgtgtgctggcccatcactttggcaaagaattgggattcgaaccggtgccgccaccatggactggacctggaggttcctctttgtggtggcagcagctacaggtgtccagtccgaggttcagctggtggagtctggcggtggcctggtgcagccagggggctcactccgtttgtcctgtgcagcttctggcttcaacattaaagacacctatatacactgggtgcgtcaggccccgggtaagggcctggaatgggttgcaaggatttatcctacgaatggttatactagatatgccgatagcgtcaagggccgtttcactataagcgcagacacatccaaaaacacagcctacctgcagatgaacagcctgcgtgctgaggacactgccgtctattattgttctagatggggaggggacggcttctatgctatggactactggggtcaaggaaccctggtcaccgtctcctcgggtggtggtggatccggaggaggaggaagtggaggtggaggttctgatatccagatgacccagtccccgagctccctgtccgcctctgtgggcgatagggtcaccatcacctgccgtgccagtcaggatgtgaatactgctgtagcctggtatcaacagaaaccaggaaaagctccgaaactactgatttactcggcatccttcctctactctggagtcccttctcgcttctctggatccagatctgggacggatttcactctgaccatcagcagtctgcagccggaagacttcgcaacttattactgtcagcaacattatactactcctcccacgttcggacagggtaccaaggtggagatcaaagagcccaaatcttgtgacaaaacttacacatgcccaccgtgcccagcacctgaactcgtggggggaccgtcagtcttcctcctccccccaaaacccaaggacaccctcatgatctcccggacccctgaggtcacatgcgtggtggtggacgtgagccacgaagaccctgaggtcaagttcaactggtacgtggacggcgtggaggtgcataatgccaagacaaagccgccggaggagcagtacaacagcacgctccgtgtggtcagcgtcctcaccgtcctgcaccaggactggctgaatggcaaggagtacaagtgcaaggtctccaacaaagccctcccagcccccatcgagaaaaccatctccaaagccaaagggcagccccgagaaccacaggtgtacaccctgcccccatcccgggatgagctgaccaagaaccaggtcagcctgacctgcctggtcaaaggcttctatcccagcgacatcgccgtggagtgggagagcaatgggcagccggagaacaactacaagaccacgcctctcgtgctggactccgacggctccttcttcctctacagcaagctcaccgtggacaagagcaggtggcagcaggggaacgtcttctcatgctccgtgatgcatgaggctctgcacaaccactacacgcagaagagcctctccctgtctccgggtaaatagtagtaactcgaggacggggtgaactacgcctgaggatccgatctttttccctctgccaaaaattatggggacatcatgaagccccttgagcatctgacttctggctaataaaggaaatttattttcattgcaatagtgtgttggaattttttgtgtctctcactcggcctaggtagataagtagcatggcgggttaatcattaactacaaggaacccctagtgatggagttggccactccctctctgcgcgctcgctcgctcactgaggccgggcgaccaaaggtcgcccgacgcccgggctttgcccgggcggcctcagtgagcgagcgagcgcgcag

SEQ ID NO: 5188 - DNA, 3284 bp, synthetic construct
  source 1..3284: mol_type = other DNA
ctgcgcgctcgctcgctcactgaggccgcccgggcaaagcccgggcgtcgggcgacctttggtcgcccggcctcagtgagcgagcgagcgcgcagagagggagtggccaactccatcactaggggttccttgtagttaatgattaacccgccatgctacttatctaccagggtaatggggatcctctagaactatagctagtcgacattgattattgactagttattaatagtaatcaattacggggtcattagttcatagcccatatatggagttccgcgttacataacttacggtaaatggcccgcctggctgaccgcccaacgacccccgcccattgacgtcaataatgacgtatgttcccatagtaacgccaatagggactttccattgacgtcaatgggtggagtatttacggtaaactgcccacttggcagtacatcaagtgtatcatatgccaagtacgccccctattgacgtcaatgacggtaaatggcccgcctggcattatgcccagtacatgaccttatgggactttcctacttggcagtacatctacgtattagtcatcgctattaccatgtcgaggccacgttctgcttcactctccccatctcccccccctccccacccccaattttgtatttatttattttttaattattttgtgcagcgatgggggcggggggggggggcgcgcgccaggcggggcggggcggggcgaggggcggggcggggcgaggcggagaggtgcggcggcagccaatcagagcggcgcgctccgaaagtttccttttatggcgaggcggcggcggcggcggccctataaaaagcgaagcgcgcggcgggcgggagcaagcttcgtttagtgaaccgtcagatcgcctggagacgccatccacgctgttttgacctccatagaagacaccgggaccgatccagcctccgcggattcgaatcccggccgggaacggtgcattggaacgcggattccccgtgccaagagtgacgtaagtaccgcctatagagtctataggcccacaaaaaatgctttcttcttttaatatacttttttgtttatcttatttctaatactttccctaatctctttctttcagggcaataatgatacaatgtatcatgcctctttgcaccattctaaagaataacagtgataatttctgggttaaggcaatagcaatatttctgcatataaatatttctgcatataaattgtaactgatgtaagaggtttcatattgctaatagcagctacaatccagctaccattctgcttttattttatggttgggataaggctggattattctgagtccaagctaggcccttttgctaatcatgttcatacctcttatcttcctcccacagctcctgggcaacgtgctggtctgtgtgctggcccatcactttggcaaagaattgggattcgaaccggtgccgccaccatggactggacctggaggttcctctttgtggtggcagcagctacaggtgtccagtccgaggttcagctggtggagtctggcggtggcctggtgcagccagggggctcactccgtttgtcctgtgcagcttctggcttcaccttcaccgactataccatggattgggtgcgtcaggccccgggtaagggcctggaatgggttgcagacgtgaatcctaattctggtggttctatatataatcagcgtttcaagggccgtttcactctgagcgttgaccgttccaaaaacacactgtacctgcagatgaacagcctgcgtgctgaggacactgccgtctattattgtgcaagaaatctggggcctagcttctatttcgactactggggtcaaggaaccctggtcaccgtctcctcgggtggtggtggatccggaggaggaggaagtggaggtggaggttctgatatccagatgacccagtccccgagctccctgtccgcctctgtgggcgatagggtcaccatcacctgcaaagccagtcaggatgtgtccattggggtagcctggtatcaacagaaaccaggaaaagctccgaaactactgatttactcggcatcctatcgctacacgggagtcccttctcgcttctctggatccggttctgggacggatttcactctgaccatcagcagtctgcagccggaagacttcgcaacttattactgtcagcaatactatatctatccttacacgttcggacagggtaccaaggtggagatcaaagagcccaaatcttgtgacaaaacttacacatgcccaccgtgcccagcacctgaactcgtggggggaccgtcagtcttcctcctccccccaaaacccaaggacaccctcatgatctcccggacccctgaggtcacatgcgtggtggtggacgtgagccacgaagaccctgaggtcaagttcaactggtacgtggacggcgtggaggtgcataatgccaagacaaagccgccggaggagcagtacaacagcacgctccgtgtggtcagcgtcctcaccgtcctgcaccaggactggctgaatggcaaggagtacaagtgcaaggtctccaacaaagccctcccagcccccatcgagaaaaccatctccaaagccaaagggcagccccgagaaccacaggtgtacaccctgcccccatcccgggatgagctgaccaagaaccaggtcagcctgacctgcctggtcaaaggcttctatcccagcgacatcgccgtggagtgggagagcaatgggcagccggagaacaactacaagaccacgcctctcgtgctggactccgacggctccttcttcctctacagcaagctcaccgtggacaagagcaggtggcagcaggggaacgtcttctcatgctccgtgatgcatgaggctctgcacaaccactacacgcagaagagcctctccctgtctccgggtaaatagtagtaactcgaggacggggtgaactacgcctgaggatccgatctttttccctctgccaaaaattatggggacatcatgaagccccttgagcatctgacttctggctaataaaggaaatttattttcattgcaatagtgtgttggaattttttgtgtctctcactcggcctaggtagataagtagcatggcgggttaatcattaactacaaggaacccctagtgatggagttggccactccctctctgcgcgctcgctcgctcactgaggccgggcgaccaaaggtcgcccgacgcccgggctttgcccgggcggcctcagtgagcgagcgagcgcgcag

SEQ ID NO: 5189 - DNA, 4742 bp, synthetic construct
  source 1..4742: mol_type = other DNA
ctgcgcgctcgctcgctcactgaggccgcccgggcaaagcccgggcgtcgggcgacctttggtcgcccggcctcagtgagcgagcgagcgcgcagagagggagtggccaactccatcactaggggttccttgtagttaatgattaacccgccatgctacttatctaccagggtaatggggatcctctagaactatagctagtcgacattgattattgactagttattaatagtaatcaattacggggtcattagttcatagcccatatatggagttccgcgttacataacttacggtaaatggcccgcctggctgaccgcccaacgacccccgcccattgacgtcaataatgacgtatgttcccatagtaacgccaatagggactttccattgacgtcaatgggtggagtatttacggtaaactgcccacttggcagtacatcaagtgtatcatatgccaagtacgccccctattgacgtcaatgacggtaaatggcccgcctggcattatgcccagtacatgaccttatgggactttcctacttggcagtacatctacgtattagtcatcgctattaccatgtcgaggccacgttctgcttcactctccccatctcccccccctccccacccccaattttgtatttatttattttttaattattttgtgcagcgatgggggcggggggggggggcgcgcgccaggcggggcggggcggggcgaggggcggggcggggcgaggcggagaggtgcggcggcagccaatcagagcggcgcgctccgaaagtttccttttatggcgaggcggcggcggcggcggccctataaaaagcgaagcgcgcggcgggcgggagcaagcttcgtttagtgaaccgtcagatcgcctggagacgccatccacgctgttttgacctccatagaagacaccgggaccgatccagcctccgcggattcgaatcccggccgggaacggtgcattggaacgcggattccccgtgccaagagtgacgtaagtaccgcctatagagtctataggcccacaaaaaatgctttcttcttttaatatacttttttgtttatcttatttctaatactttccctaatctctttctttcagggcaataatgatacaatgtatcatgcctctttgcaccattctaaagaataacagtgataatttctgggttaaggcaatagcaatatttctgcatataaatatttctgcatataaattgtaactgatgtaagaggtttcatattgctaatagcagctacaatccagctaccattctgcttttattttatggttgggataaggctggattattctgagtccaagctaggcccttttgctaatcatgttcatacctcttatcttcctcccacagctcctgggcaacgtgctggtctgtgtgctggcccatcactttggcaaagaattgggattcgaaccggtgccgccaccatggactggacctggaggttcctctttgtggtggcagcagctacaggtgtccagtcccaagttcagctggtgcagtctggtgcagaagttaagaagccaggggcatcagtaaaggtgtcctgcaaggcttctggctactctttcactgggtatttcataaattgggtgagagaggcccccggccagggcctggaatggatgggccatatttcctcctcttatgcaacttctacatataaccagaagtttcagggcagagtcactttcactgtggacacatccagctctacagcctacatggagctgtcaagcctgagatctgaggacactgcagtctattattgtgtgagaagtggaaactatgaagagtatgctatggactactggggtcaaggaaccctggtcacagtctcctcagcctctaccaagggcccatctgtcttccccctggcaccctcctccaagagcacctctgggggcacagcagccctgggctgcctggtcaaggactacttccctgaacctgtgacagtctcttggaactcaggggccctgacctctggggtgcacaccttcccagctgtcctacagtcctcaggactctactccctctcttctgtggtgacagtgccctccagcagcttgggcacccagacctacatctgcaatgtgaatcacaagcccagcaacaccaaggtggacaagaaagttgagccccccaaatcttgtgacaaaactcacacatgcccaccctgcccagcacctgaactcctggggggaccctcagtcttcctcttccccccaaaacccaaggacaccctcatgatctccagaacccctgaggtcacatgtgtggtggtggatgtgagccatgaagaccctgaggtcaagttcaactggtatgtggatggggtggaggtgcataatgccaagacaaagcccagagaggagcagtacaacagcacctacagagtggtctcagtcctcactgtcctgcaccaggactggctgaatggcaaggagtacaagtgcaaggtctccaacaaagccctcccagcccccatagagaaaaccatctccaaagccaaagggcagcccagagaaccacaggtgtacaccctgcccccatccagagatgagctgaccaagaaccaggtcagcctgacctgcctggtcaaaggcttctatccctctgacattgctgtggagtgggagagcaatgggcagccagagaacaactacaagaccacccctccagtgctggactctgatggctccttcttcctctacagcaagctcacagtggacaagagcaggtggcagcaggggaatgtcttctcatgctctgtgatgcatgaggctctgcacaaccactacactcagaagagcctctccctgtctcctggtaaaagaaagaggagagagggcagaggaagtcttctaacatgtggtgatgtggaggagaatcctggccctatggacatgagggtccctgctcagctcctggggctcctgctgctctggctctcaggtgccagatgtgaggttcagctggtggagtctggtggtggcctggtgcagccagggggctcactcagattgtcctgtgcagcttctggcttcaacattaaagacacctatatacactgggtgagacaggcccctggaaagggcctggaatgggttgcaaggatttatcctactaatggttatactagatatgcagatagtgtcaagggcagattcactataagtgcagacacatccaaaaacacagcctacctgcagatgaacagcctgagagctgaggacactgcagtctattattgttctagatggggaggggatggcttctatgctatggactactggggtcaaggaaccctggtcacagtctcctctggtggtggtggatctggaggaggaggaagtggaggtggaggttctgatatccagatgacccagtccccaagctccctgtctgcctctgtgggggatagggtcaccatcacctgcagagccagtcaggatgtgaatactgctgtagcctggtatcaacagaaaccaggaaaagctcccaaactactgatttactctgcatccttcctctactctggagtcccttctagattctctggatccagatctggcactgacttcactctgaccatcagtagtctgcagcctgaagactttgcaacttattactgtcaacaacattatactactcctcccacctttggacagggtaccaaggtggagatcaaaggctctgatattgtactgacccagtcccctgactccctggctgtgtctctgggggaaagggcaaccatcaactgcaggagtagtcagacccttctgtactctaataaccagaaaaactacctggcctggtatcaaaaaaaaccaggacagcctcctaaactactgattagttgggcattcactaggaagtctggagtccctgacaggttctctggatctgggtctggaacagatttcacactgaccatcagcagtctgcaggctgaagatgttgcagtctactactgtcagcaatactcaaactacccttggacttttggacaggggaccaaagtggagatcaaaaggactgtcgctgcaccatctgtcttcatcttcccaccatctgatgagcagttgaaatctggaactgcctctgttaagtgcctgctgaataacttctatcccagagaggccaaagtacagtggaaggtggataatgccctccaaagtggtaactcccaggagagtgtcacagagcaggacagcaaggacagcacctacagcctcagcagcaccctgaccctgagcaaagcagactatgagaaacacaaagtctatgcctgtgaagtcacccatcagggcctgagcagcccagtcacaaagagcttcaacaggggagagtgttagtagtaactcgaggacggggtgaactacgcctgaggatccgatctttttccctctgccaaaaattatggggacatcatgaagccccttgagcatctgacttctggctaataaaggaaatttattttcattgcaatagtgtgttggaattttttgtgtctctcactcggcctaggtagataagtagcatggcgggttaatcattaactacaaggaacccctagtgatggagttggccactccctctctgcgcgctcgctcgctcactgaggccgggcgaccaaaggtcgcccgacgcccgggctttgcccgggcggcctcagtgagcgagcgagcgcgcag

SEQ ID NO: 5190 - DNA, 3989 bp, synthetic construct
  source 1..3989: mol_type = other DNA
ctgcgcgctcgctcgctcactgaggccgcccgggcaaagcccgggcgtcgggcgacctttggtcgcccggcctcagtgagcgagcgagcgcgcagagagggagtggccaactccatcactaggggttccttgtagttaatgattaacccgccatgctacttatctaccagggtaatggggatcctctagaactatagctagtcgacattgattattgactagttattaatagtaatcaattacggggtcattagttcatagcccatatatggagttccgcgttacataacttacggtaaatggcccgcctggctgaccgcccaacgacccccgcccattgacgtcaataatgacgtatgttcccatagtaacgccaatagggactttccattgacgtcaatgggtggagtatttacggtaaactgcccacttggcagtacatcaagtgtatcatatgccaagtacgccccctattgacgtcaatgacggtaaatggcccgcctggcattatgcccagtacatgaccttatgggactttcctacttggcagtacatctacgtattagtcatcgctattaccatgtcgaggccacgttctgcttcactctccccatctcccccccctccccacccccaattttgtatttatttattttttaattattttgtgcagcgatgggggcggggggggggggcgcgcgccaggcggggcggggcggggcgaggggcggggcggggcgaggcggagaggtgcggcggcagccaatcagagcggcgcgctccgaaagtttccttttatggcgaggcggcggcggcggcggccctataaaaagcgaagcgcgcggcgggcgggagcaagcttcgtttagtgaaccgtcagatcgcctggagacgccatccacgctgttttgacctccatagaagacaccgggaccgatccagcctccgcggattcgaatcccggccgggaacggtgcattggaacgcggattccccgtgccaagagtgacgtaagtaccgcctatagagtctataggcccacaaaaaatgctttcttcttttaatatacttttttgtttatcttatttctaatactttccctaatctctttctttcagggcaataatgatacaatgtatcatgcctctttgcaccattctaaagaataacagtgataatttctgggttaaggcaatagcaatatttctgcatataaatatttctgcatataaattgtaactgatgtaagaggtttcatattgctaatagcagctacaatccagctaccattctgcttttattttatggttgggataaggctggattattctgagtccaagctaggcccttttgctaatcatgttcatacctcttatcttcctcccacagctcctgggcaacgtgctggtctgtgtgctggcccatcactttggcaaagaattgggattcgaaccggtgccgccaccatggactggacctggaggttcctctttgtggtggcagcagctacaggtgtccagtctgaggttcagctggtggagtctggaggtggcctggtgcagccagggggctcactcagattgtcctgtgcagcttctggcttcaacattaaagacacctatatacactgggtgagacaggccccaggtaagggcctggaatgggttgcaaggatttatcctaccaatggttatactagatatgctgattctgtcaagggcagattcactatatctgcagacacatccaaaaacacagcctacctgcagatgaacagcctgagagctgaggacactgctgtctattattgttctagatggggaggggatggcttctatgctatggactactggggtcaaggaaccctggtcacagtctcctctgcctctaccaagggcccatctgtcttccccctggcaccctcctccaagagcacctctgggggcacagctgccctgggctgcctggtcaaggactacttccctgaacctgtgacagtctcctggaactcaggagccctgaccagtggagtgcacaccttccctgctgtcctacagtcctcaggactctactccctcagctctgtggtgacagtgccctccagcagcttgggcacccagacctacatctgcaatgtgaatcacaagcccagcaacaccaaggtggacaagagagttgagcccaaatcttgtgacaaaactcacacatgcccaccttgcccagcacctgaactggtggggggaccatcagtcttcctcctccccccaaaacccaaggacaccctcatgatctccagaacccctgaggtcacatgtgtggtggtggatgtgagccatgaagaccctgaggtcaagttcaactggtatgtggatggagtggaggtgcataatgccaagacaaagccccctgaggagcagtacaacagcactctcagagtggtctctgtcctcacagtcctgcaccaggactggctgaatggcaaggagtacaagtgcaaggtctccaacaaagccctcccagcccccattgagaaaaccatctccaaagccaaagggcagcccagagaaccacaggtgtacaccctgcccccatccagagatgagctgaccaagaaccaggtcagcctgacctgcctggtcaaaggcttctatccctctgacattgctgtggagtgggagagcaatgggcagcctgagaacaactacaagaccacacctcttgtgctggactctgatggctccttcttcctctacagcaagctcacagtggacaagagcaggtggcagcaggggaatgtcttctcatgctctgtgatgcatgaggctctgcacaaccactacacccagaagagcctctccctgtctccaggtaaaagaaagaggagagagggcagaggaagtcttctaacatgtggtgatgtggaggagaatcctggccctatggacatgagggtccctgctcagctcctggggctcctgctgctctggctctcaggtgccagatgtgatatccagatgacccagtcccctagctccctgtctgcctctgtgggagatagggtcaccatcacctgcagagccagtcaggatgtgaatactgctgtagcctggtatcaacagaaaccaggaaaagctcctaaactactgatttactctgcatccttcctctactctggagtcccttctaggttctctggatccagatctgggactgatttcactctgaccatcagcagtctgcagccagaagactttgcaacttattactgtcagcaacattatactactcctcccacttttggacagggtaccaaggtggagatcaaaagaactgtggctgcaccatctgtcttcatcttcccaccatctgatgagcagttgaaatctggaactgcctctgttgtgtgcctgctgaataacttctatcccagagaggccaaagtacagtggaaggtggataatgccctccaatcaggtaactcccaggagagtgtcacagagcaggacagcaaggacagcacctacagcctcagcagcaccctgactctgagcaaagcagactatgagaaacacaaagtctatgcctgtgaagtcacccatcagggcctgagctctcctgtcacaaagagcttcaacaggggagagtgttagtagtaactcgaggacggggtgaactacgcctgaggatccgatctttttccctctgccaaaaattatggggacatcatgaagccccttgagcatctgacttctggctaataaaggaaatttattttcattgcaatagtgtgttggaattttttgtgtctctcactcggcctaggtagataagtagcatggcgggttaatcattaactacaaggaacccctagtgatggagttggccactccctctctgcgcgctcgctcgctcactgaggccgggcgaccaaaggtcgcccgacgcccgggctttgcccgggcggcctcagtgagcgagcgagcgcgcag

SEQ ID NO: 5191 - DNA, 360 bp, synthetic construct; identical to SEQ ID NO: 5002
  source 1..360: mol_type = other DNA

SEQ ID NO: 5192 - protein, 120 aa, synthetic construct [sequence omitted]

SEQ ID NO: 5193 - DNA, 1353 bp, synthetic construct
  source 1..1353: mol_type = other DNA
gaggttcagctggtggagtctggcggtggcctggtgcagccagggggctcactccgtttgtcctgtgcagcttctggcttcaacattaaagacacctatatacactgggtgcgtcaggccccgggtaagggcctggaatgggttgcaaggatttatcctacgaatggttatactagatatgccgatagcgtcaagggccgtttcactataagcgcagacacatccaaaaacacagcctacctgcagatgaacagcctgcgtgctgaggacactgccgtctattattgttctagatggggaggggacggcttctatgctatggactactggggtcaaggaaccctggtcaccgtctcctcggcgtcgaccaagggcccatcggtcttccccctggcaccctcctccaagagcacctctgggggcacagcggccctgggctgcctggtcaaggactacttccccgaacctgtgacggtctcgtggaactcaggcgccctgaccagcggcgtgcacaccttcccggctgtcctacagtcctcaggactctactccctcagcagcgtggtgaccgtgccctccagcagcttgggcacccagacctacatctgcaacgtgaatcacaagcccagcaacaccaaggtggacaagaaagttgagccccccaaatcttgtgacaaaactcacacatgcccaccgtgcccagcacctgaactcctggggggaccgtcagtcttcctcttccccccaaaacccaaggacaccctcatggcatcccggacccctgaggtcacatgcgtggtggtggacgtgagccacgaagaccctgaggtcaagttcaactggtacgtggacggcgtggaggtgcataatgccaagacaaagccgcgggaggagcagtacaacagcacgtaccgtgtggtcagcgtcctcaccgtcctggcccaggactggctgaatggcaaggagtacaagtgcaaggtctccaacaaagccctcccagcccccatcgagaaaaccatctccaaagccaaagggcagccccgagaaccacaggtgtacaccctgcccccatcccgggatgagctgaccaagaaccaggtcagcctgacctgcctggtcaaaggcttctatcccagcgacatcgccgtggagtgggagagcaatgggcagccggagaacaactacaagaccacgcctcccgtgctggactccgacggctccttcttcctctacagcaagctcaccgtggacaagagcaggtggcagcaggggaacgtcttctcatgctccgtgatgcatgaggctctgcacaaccactacacgcagaagagcctctccctgtctccgggtaaa

SEQ ID NO: 5194 - protein, 451 aa, synthetic construct
EVQLVESGGGLVQPGGSLRLSCAASGFNIKDTYIHWVRQAPGKGLEWVARIYPTNGYTRYADSVKGRFTISADTSKNTAYLQMNSLRAEDTAVYYCSRWGGDGFYAMDYWGQGTLVTVSSASTKGPSVFPLAPSSKSTSGGTAALGCLVKDYFPEPVTVSWNSGALTSGVHTFPAVLQSSGLYSLSSVVTVPSSSLGTQTYICNVNHKPSNTKVDKKVEPPKSCDKTHTCPPCPAPELLGGPSVFLFPPKPKDTLMASRTPEVTCVVVDVSHEDPEVKFNWYVDGVEVHNAKTKPREEQYNSTYRVVSVLTVLAQDWLNGKEYKCKVSNKALPAPIEKTISKAKGQPREPQVYTLPPSRDELTKNQVSLTCLVKGFYPSDIAVEWESNGQPENNYKTTPPVLDSDGSFFLYSKLTVDKSRWQQGNVFSCSVMHEALHNHYTQKSLSLSPGK

SEQ ID NO: 5195 - DNA, 321 bp, synthetic construct; identical to SEQ ID NO: 5005
  source 1..321: mol_type = other DNA

SEQ ID NO: 5196 - protein, 107 aa, synthetic construct [sequence omitted]

SEQ ID NO: 5197 - DNA, 642 bp, synthetic construct; identical to SEQ ID NO: 5035
  source 1..642: mol_type = other DNA

SEQ ID NO: 5198 - protein, 214 aa, synthetic construct; identical to SEQ ID NO: 5036

SEQ ID NO: 5199 - protein, 5 aa, synthetic construct
DTYIH

SEQ ID NO: 5200 - protein, 17 aa, synthetic construct
RIYPTNGYTRYADSVKG

SEQ ID NO: 5201 - protein, 11 aa, synthetic construct
WGGDGFYAMDY

SEQ ID NO: 5202 - protein, 7 aa, synthetic construct
GFNIKDT

SEQ ID NO: 5203 - protein, 6 aa, synthetic construct
YPTNGY

SEQ ID NO: 5204 - protein, 11 aa, synthetic construct
WGGDGFYAMDY

SEQ ID NO: 5205 - protein, 11 aa, synthetic construct
RASQDVNTAVA

SEQ ID NO: 5206 - protein, 7 aa, synthetic construct
SASFLYS

SEQ ID NO: 5207 - protein, 9 aa, synthetic construct
QQHYTTPPT

SEQ ID NO: 5208 - protein, 11 aa, synthetic construct
RASQDVNTAVA

SEQ ID NO: 5209 - protein, 7 aa, synthetic construct
SASFLYS

SEQ ID NO: 5210 - protein, 9 aa, synthetic construct
QQHYTTPPT

SEQ ID NO: 5211 - DNA, 993 bp, synthetic construct
  source 1..993: mol_type = other DNA
gcgtcgaccaagggcccatcggtcttccccctggcaccctcctccaagagcacctctgggggcacagcggccctgggctgcctggtcaaggactacttccccgaacctgtgacggtctcgtggaactcaggcgccctgaccagcggcgtgcacaccttcccggctgtcctacagtcctcaggactctactccctcagcagcgtggtgaccgtgccctccagcagcttgggcacccagacctacatctgcaacgtgaatcacaagcccagcaacaccaaggtggacaagaaagttgagccccccaaatcttgtgacaaaactcacacatgcccaccgtgcccagcacctgaactcctggggggaccgtcagtcttcctcttccccccaaaacccaaggacaccctcatggcatcccggacccctgaggtcacatgcgtggtggtggacgtgagccacgaagaccctgaggtcaagttcaactggtacgtggacggcgtggaggtgcataatgccaagacaaagccgcgggaggagcagtacaacagcacgtaccgtgtggtcagcgtcctcaccgtcctggcccaggactggctgaatggcaaggagtacaagtgcaaggtctccaacaaagccctcccagcccccatcgagaaaaccatctccaaagccaaagggcagccccgagaaccacaggtgtacaccctgcccccatcccgggatgagctgaccaagaaccaggtcagcctgacctgcctggtcaaaggcttctatcccagcgacatcgccgtggagtgggagagcaatgggcagccggagaacaactacaagaccacgcctcccgtgctggactccgacggctccttcttcctctacagcaagctcaccgtggacaagagcaggtggcagcaggggaacgtcttctcatgctccgtgatgcatgaggctctgcacaaccactacacgcagaagagcctctccctgtctccgggtaaa

SEQ ID NO: 5212 - protein, 331 aa, synthetic construct
ASTKGPSVFPLAPSSKSTSGGTAALGCLVKDYFPEPVTVSWNSGALTSGVHTFPAVLQSSGLYSLSSVVTVPSSSLGTQTYICNVNHKPSNTKVDKKVEPPKSCDKTHTCPPCPAPELLGGPSVFLFPPKPKDTLMASRTPEVTCVVVDVSHEDPEVKFNWYVDGVEVHNAKTKPREEQYNSTYRVVSVLTVLAQDWLNGKEYKCKVSNKALPAPIEKTISKAKGQPREPQVYTLPPSRDELTKNQVSLTCLVKGFYPSDIAVEWESNGQPENNYKTTPPVLDSDGSFFLYSKLTVDKSRWQQGNVFSCSVMHEALHNHYTQKSLSLSPGK

SEQ ID NO: 5213 - DNA, 993 bp, synthetic construct
  source 1..993: mol_type = other DNA
gcgtcgaccaagggcccatcggtcttccccctggcaccctcctccaagagcacctctgggggcacagcggccctgggctgcctggtcaaggactacttccccgaacctgtgacggtctcgtggaactcaggcgccctgaccagcggcgtgcacaccttcccggctgtcctacagtcctcaggactctactccctcagcagcgtggtgaccgtgccctccagcagcttgggcacccagacctacatctgcaacgtgaatcacaagcccagcaacaccaaggtggacaagaaagttgagccccccaaatcttgtgacaaaactcacacatgcccaccgtgcccagcacctgaactcctggggggaccgtcagtcttcctcttccccccaaaacccaaggacaccctcatggcatcccggacccctgaggtcacatgcgtggtggtggacgtgagccacgaagaccctgaggtcaagttcaactggtacgtggacggcgtggaggtgcataatgccaagacaaagccgcgggaggagcagtacaacagcacgtaccgtgtggtcagcgtcctcaccgtcctgcaccaggactggctgaatggcaaggagtacaagtgcaaggtctccaacaaagccctcccagcccccatcgagaaaaccatctccaaagccaaagggcagccccgagaaccacaggtgtacaccctgcccccatcccgggatgagctgaccaagaaccaggtcagcctgacctgcctggtcaaaggcttctatcccagcgacatcgccgtggagtgggagagcaatgggcagccggagaacaactacaagaccacgcctcccgtgctggactccgacggctccttcttcctctacagcaagctcaccgtggacaagagcaggtggcagcaggggaacgtcttctcatgctccgtgatgcatgaggctctgcacaaccagtacacgcagaagagcctctccctgtctccgggtaaa

SEQ ID NO: 5214 - protein, 331 aa, synthetic construct
ASTKGPSVFPLAPSSKSTSGGTAALGCLVKDYFPEPVTVSWNSGALTSGVHTFPAVLQSSGLYSLSSVVTVPSSSLGTQTYICNVNHKPSNTKVDKKVEPPKSCDKTHTCPPCPAPELLGGPSVFLFPPKPKDTLMASRTPEVTCVVVDVSHEDPEVKFNWYVDGVEVHNAKTKPREEQYNSTYRVVSVLTVLHQDWLNGKEYKCKVSNKALPAPIEKTISKAKGQPREPQVYTLPPSRDELTKNQVSLTCLVKGFYPSDIAVEWESNGQPENNYKTTPPVLDSDGSFFLYSKLTVDKSRWQQGNVFSCSVMHEALHNQYTQKSLSLSPGK

SEQ ID NO: 5215 - DNA, 993 bp, synthetic construct
  source 1..993: mol_type = other DNA
gcctctaccaagggcccatctgtcttccccctggcaccctcctccaagagcacctctgggggcacagcagccctgggctgcctggtcaaggactacttccctgaacctgtgacagtctcttggaactcaggggccctgacctctggggtgcacaccttcccagctgtcctacagtcctcaggactctactccctctcttctgtggtgacagtgccctccagcagcttgggcacccagacctacatctgcaatgtgaatcacaagcccagcaacaccaaggtggacaagaaagttgagccccccaaatcttgtgacaaaactcacacatgcccaccctgcccagcacctgaactcctggggggaccctcagtcttcctcttccccccaaaacccaaggacaccctcatgatctccagaacccctgaggtcacatgtgtggtggtggatgtgagccatgaagaccctgaggtcaagttcaactggtatgtggatggggtggaggtgcataatgccaagacaaagcccagagaggagcagtacaacagcacctacagagtggtctcagtcctcactgtcctgcaccaggactggctgaatggcaaggagtacaagtgcaaggtctccaacaaagccctcccagcccccatagagaaaaccatctccaaagccaaagggcagcccagagaaccacaggtgtacaccctgcccccatccagagatgagctgaccaagaaccaggtcagcctgacctgcctggtcaaaggcttctatccctctgacattgctgtggagtgggagagcaatgggcagccagagaacaactacaagaccacccctccagtgctggactctgatggctccttcttcctctacagcaagctcacagtggacaagagcaggtggcagcaggggaatgtcttctcatgctctgtgatgcatgaggctctgcacaaccactacactcagaagagcctctccctgtctcctggtaaa

SEQ ID NO: 5216 - protein, 331 aa, synthetic construct; identical to SEQ ID NO: 5004

SEQ ID NO: 5217 - DNA, 321 bp, synthetic construct
  source 1..321: mol_type = other DNA
aggactgtcgctgcaccatctgtcttcatcttcccaccatctgatgagcagttgaaatctggaactgcctctgttaagtgcctgctgaataacttctatcccagagaggccaaagtacagtggaaggtggataatgccctccaaagtggtaactcccaggagagtgtcacagagcaggacagcaaggacagcacctacagcctcagcagcaccctgaccctgagcaaagcagactatgagaaacacaaagtctatgcctgtgaagtcacccatcagggcctgagcagcccagtcacaaagagcttcaacaggggagagtgt

SEQ ID NO: 5218 - protein, 107 aa, synthetic construct
RTVAAPSVFIFPPSDEQLKSGTASVKCLLNNFYPREAKVQWKVDNALQSGNSQESVTEQDSKDSTYSLSSTLTLSKADYEKHKVYACEVTHQGLSSPVTKSFNRGEC

SEQ ID NO: 5219 - DNA, 990 bp, synthetic construct
  source 1..990: mol_type = other DNA
gcctctaccaagggcccatctgtcttccccctggcaccctcctccaagagcacctctgggggcacagctgccctgggctgcctggtcaaggactacttccctgaacctgtgacagtctcctggaactcaggagccctgaccagtggagtgcacaccttccctgctgtcctacagtcctcaggactctactccctcagctctgtggtgacagtgccctccagcagcttgggcacccagacctacatctgcaatgtgaatcacaagcccagcaacaccaaggtggacaagagagttgagcccaaatcttgtgacaaaactcacacatgcccaccttgcccagcacctgaactggtggggggaccatcagtcttcctcctccccccaaaacccaaggacaccctcatgatctccagaacccctgaggtcacatgtgtggtggtggatgtgagccatgaagaccctgaggtcaagttcaactggtatgtggatggagtggaggtgcataatgccaagacaaagccccctgaggagcagtacaacagcactctcagagtggtctctgtcctcacagtcctgcaccaggactggctgaatggcaaggagtacaagtgcaaggtctccaacaaagccctcccagcccccattgagaaaaccatctccaaagccaaagggcagcccagagaaccacaggtgtacaccctgcccccatccagagatgagctgaccaagaaccaggtcagcctgacctgcctggtcaaaggcttctatccctctgacattgctgtggagtgggagagcaatgggcagcctgagaacaactacaagaccacacctcttgtgctggactctgatggctccttcttcctctacagcaagctcacagtggacaagagcaggtggcagcaggggaatgtcttctcatgctctgtgatgcatgaggctctgcacaaccactacacccagaagagcctctccctgtctccaggtaaa

SEQ ID NO: 5220 - protein, 330 aa, synthetic construct; identical to SEQ ID NO: 5018

SEQ ID NO: 5221 - DNA, 321 bp, synthetic construct
  source 1..321: mol_type = other DNA
agaactgtggctgcaccatctgtcttcatcttcccaccatctgatgagcagttgaaatctggaactgcctctgttgtgtgcctgctgaataacttctatcccagagaggccaaagtacagtggaaggtggataatgccctccaatcaggtaactcccaggagagtgtcacagagcaggacagcaaggacagcacctacagcctcagcagcaccctgactctgagcaaagcagactatgagaaacacaaagtctatgcctgtgaagtcacccatcagggcctgagctctcctgtcacaaagagcttcaacaggggagagtgt

SEQ ID NO: 5222 - protein, 107 aa, synthetic construct [sequence omitted]

SEQ ID NO: 5223 - DNA, 360 bp, synthetic construct; identical to SEQ ID NO: 5002
  source 1..360: mol_type = other DNA

SEQ ID NO: 5224 - protein, 120 aa, synthetic construct [sequence omitted]

SEQ ID NO: 5225 - DNA, 1353 bp, synthetic construct
  source 1..1353: mol_type = other DNA
gaggttcagctggtggagtctggcggtggcctggtgcagccagggggctcactccgtttgtcctgtgcagcttctggcttcaacattaaagacacctatatacactgggtgcgtcaggccccgggtaagggcctggaatgggttgcaaggatttatcctacgaatggttatactagatatgccgatagcgtcaagggccgtttcactataagcgcagacacatccaaaaacacagcctacctgcagatgaacagcctgcgtgctgaggacactgccgtctattattgttctagatggggaggggacggcttctatgctatggactactggggtcaaggaaccctggtcaccgtctcctcggcgtcgaccaagggcccatcggtcttccccctggcaccctcctccaagagcacctctgggggcacagcggccctgggctgcctggtcaaggactacttccccgaacctgtgacggtctcgtggaactcaggcgccctgaccagcggcgtgcacaccttcccggctgtcctacagtcctcaggactctactccctcagcagcgtggtgaccgtgccctccagcagcttgggcacccagacctacatctgcaacgtgaatcacaagcccagcaacaccaaggtggacaagaaagttgagccccccaaatcttgtgacaaaactcacacatgcccaccgtgcccagcacctgaactcctggggggaccgtcagtcttcctcttccccccaaaacccaaggacaccctcatggcatcccggacccctgaggtcacatgcgtggtggtggacgtgagccacgaagaccctgaggtcaagttcaactggtacgtggacggcgtggaggtgcataatgccaagacaaagccgcgggaggagcagtacaacagcacgtaccgtgtggtcagcgtcctcaccgtcctgcaccaggactggctgaatggcaaggagtacaagtgcaaggtctccaacaaagccctcccagcccccatcgagaaaaccatctccaaagccaaagggcagccccgagaaccacaggtgtacaccctgcccccatcccgggatgagctgaccaagaaccaggtcagcctgacctgcctggtcaaaggcttctatcccagcgacatcgccgtggagtgggagagcaatgggcagccggagaacaactacaagaccacgcctcccgtgctggactccgacggctccttcttcctctacagcaagctcaccgtggacaagagcaggtggcagcaggggaacgtcttctcatgctccgtgatgcatgaggctctgcacaaccagtacacgcagaagagcctctccctgtctccgggtaaa

SEQ ID NO: 5226 - protein, 451 aa, synthetic construct
EVQLVESGGGLVQPGGSLRLSCAASGFNIKDTYIHWVRQAPGKGLEWVARIYPTNGYTRYADSVKGRFTISADTSKNTAYLQMNSLRAEDTAVYYCSRWGGDGFYAMDYWGQGTLVTVSSASTKGPSVFPLAPSSKSTSGGTAALGCLVKDYFPEPVTVSWNSGALTSGVHTFPAVLQSSGLYSLSSVVTVPSSSLGTQTYICNVNHKPSNTKVDKKVEPPKSCDKTHTCPPCPAPELLGGPSVFLFPPKPKDTLMASRTPEVTCVVVDVSHEDPEVKFNWYVDGVEVHNAKTKPREEQYNSTYRVVSVLTVLHQDWLNGKEYKCKVSNKALPAPIEKTISKAKGQPREPQVYTLPPSRDELTKNQVSLTCLVKGFYPSDIAVEWESNGQPENNYKTTPPVLDSDGSFFLYSKLTVDKSRWQQGNVFSCSVMHEALHNQYTQKSLSLSPGK

SEQ ID NO: 5227 - DNA, 321 bp, synthetic construct; identical to SEQ ID NO: 5005
  source 1..321: mol_type = other DNA

SEQ ID NO: 5228 - protein, 107 aa, synthetic construct [sequence omitted]

SEQ ID NO: 5229 - DNA, 642 bp, synthetic construct; identical to SEQ ID NO: 5035
  source 1..642: mol_type = other DNA

SEQ ID NO: 5230 - protein, 214 aa, synthetic construct; identical to SEQ ID NO: 5036

SEQ ID NO: 5231 - protein, 5 aa, synthetic construct
DTYIH

SEQ ID NO: 5232 - protein, 17 aa, synthetic construct
RIYPTNGYTRYADSVKG

SEQ ID NO: 5233 - protein, 11 aa, synthetic construct
WGGDGFYAMDY

SEQ ID NO: 5234 - protein, 7 aa, synthetic construct
GFNIKDT

SEQ ID NO: 5235 - protein, 6 aa, synthetic construct
YPTNGY

SEQ ID NO: 5236 - protein, 11 aa, synthetic construct
WGGDGFYAMDY

SEQ ID NO: 5237 - protein, 11 aa, synthetic construct
RASQDVNTAVA

SEQ ID NO: 5238 - protein, 7 aa, synthetic construct
SASFLYS

SEQ ID NO: 5239 - protein, 9 aa, synthetic construct
QQHYTTPPT

SEQ ID NO: 5240 - protein, 11 aa, synthetic construct
RASQDVNTAVA

SEQ ID NO: 5241 - protein, 7 aa, synthetic construct
SASFLYS

SEQ ID NO: 5242 - protein, 9 aa, synthetic construct
QQHYTTPPT

SEQ ID NO: 5243 - skipped

SEQ ID NO: 5244 - DNA, 1350 bp, synthetic construct
  source 1..1350: mol_type = other DNA
gaggttcagctggtggagtctggaggtggcctggtgcagccagggggctcactcagattgtcctgtgcagcttctggcttcaacattaaagacacctatatacactgggtgagacaggccccaggtaagggcctggaatgggttgcaaggatttatcctaccaatggttatactagatatgctgattctgtcaagggcagattcactatatctgcagacacatccaaaaacacagcctacctgcagatgaacagcctgagagctgaggacactgctgtctattattgttctagatggggaggggatggcttctatgctatggactactggggtcaaggaaccctggtcacagtctcctctgcctctaccaagggcccatctgtcttccccctggcaccctcctccaagagcacctctgggggcacagctgccctgggctgcctggtcaaggactacttccctgaacctgtgacagtctcctggaactcaggagccctgaccagtggagtgcacaccttccctgctgtcctacagtcctcaggactctactccctcagctctgtggtgacagtgccctccagcagcttgggcacccagacctacatctgcaatgtgaatcacaagcccagcaacaccaaggtggacaagagagttgagcccaaatcttgtgacaaaactcacacatgcccaccttgcccagcacctgaactggtggggggaccatcagtcttcctcctccccccaaaacccaaggacaccctcatgatctccagaacccctgaggtcacatgtgtggtggtggatgtgagccatgaagaccctgaggtcaagttcaactggtatgtggatggagtggaggtgcataatgccaagacaaagccccctgaggagcagtacaacagcactctcagagtggtctctgtcctcacagtcctgcaccaggactggctgaatggcaaggagtacaagtgcaaggtctccaacaaagccctcccagcccccattgagaaaaccatctccaaagccaaagggcagcccagagaaccacaggtgtacaccctgcccccatccagagatgagctgaccaagaaccaggtcagcctgacctgcctggtcaaaggcttctatccctctgacattgctgtggagtgggagagcaatgggcagcctgagaacaactacaagaccacacctcttgtgctggactctgatggctccttcttcctctacagcaagctcacagtggacaagagcagatggcagcaggggaatgtcttctcatgctctgtgatgcatgaggctctgcacaaccactacacccagaagagcctctccctgtctccaggtaaa

SEQ ID NO: 5245 - DNA, 321 bp, synthetic construct
  source 1..321: mol_type = other DNA
gatatccagatgacccagtcccctagctccctgtctgcctctgtgggagatagggtcaccatcacctgtagagccagtcaggatgtgaatactgctgtagcctggtatcaacagaaaccaggaaaagctcctaaactactgatttactctgcatccttcctctactctggagtcccttctaggttctctggatccagatctgggactgatttcactctgaccatcagcagtctgcagccagaagactttgcaacttattactgtcagcaacattatactactcctcccacttttggacagggtaccaaggtggagatcaaa

SEQ ID NO: 5246 - DNA, 642 bp, synthetic construct
  source 1..642: mol_type = other DNA
gatatccagatgacccagtcccctagctccctgtctgcctctgtgggagatagggtcaccatcacctgtagagccagtcaggatgtgaatactgctgtagcctggtatcaacagaaaccaggaaaagctcctaaactactgatttactctgcatccttcctctactctggagtcccttctaggttctctggatccagatctgggactgatttcactctgaccatcagcagtctgcagccagaagactttgcaacttattactgtcagcaacattatactactcctcccacttttggacagggtaccaaggtggagatcaaaagaactgtggctgcaccatctgtcttcatcttcccaccatctgatgagcagttgaaatctggaactgcctctgttgtgtgcctgctgaataacttctatcccagagaggccaaagtacagtggaaggtggataatgccctccaatcaggtaactcccaggagagtgtcacagagcaggacagcaaggacagcacctacagcctcagcagcaccctgactctgagcaaagcagactatgagaaacacaaagtctatgcctgtgaagtcacccatcagggcctgagctctcctgtcacaaagagcttcaacaggggagagtgt

SEQ ID NO: 5247 - DNA, 990 bp, synthetic construct
  source 1..990: mol_type = other DNA
gcctctaccaagggcccatctgtcttccccctggcaccctcctccaagagcacctctgggggcacagctgccctgggctgcctggtcaaggactacttccctgaacctgtgacagtctcctggaactcaggagccctgaccagtggagtgcacaccttccctgctgtcctacagtcctcaggactctactccctcagctctgtggtgacagtgccctccagcagcttgggcacccagacctacatctgcaatgtgaatcacaagcccagcaacaccaaggtggacaagagagttgagcccaaatcttgtgacaaaactcacacatgcccaccttgcccagcacctgaactggtggggggaccatcagtcttcctcctccccccaaaacccaaggacaccctcatgatctccagaacccctgaggtcacatgtgtggtggtggatgtgagccatgaagaccctgaggtcaagttcaactggtatgtggatggagtggaggtgcataatgccaagacaaagccccctgaggagcagtacaacagcactctcagagtggtctctgtcctcacagtcctgcaccaggactggctgaatggcaaggagtacaagtgcaaggtctccaacaaagccctcccagcccccattgagaaaaccatctccaaagccaaagggcagcccagagaaccacaggtgtacaccctgcccccatccagagatgagctgaccaagaaccaggtcagcctgacctgcctggtcaaaggcttctatccctctgacattgctgtggagtgggagagcaatgggcagcctgagaacaactacaagaccacacctcttgtgctggactctgatggctccttcttcctctacagcaagctcacagtggacaagagcagatggcagcaggggaatgtcttctcatgctctgtgatgcatgaggctctgcacaaccactacacccagaagagcctctccctgtctccaggtaaa

SEQ ID NO: 5248-5252 - skipped (5 entries)

SEQ ID NO: 5253 - DNA, 360 bp, synthetic construct; identical to SEQ ID NO: 5002
  source 1..360: mol_type = other DNA

SEQ ID NO: 5254 - protein, 120 aa, synthetic construct [sequence omitted]

SEQ ID NO: 5255 - DNA, 321 bp, synthetic construct; identical to SEQ ID NO: 5005
  source 1..321: mol_type = other DNA

SEQ ID NO: 5256 - protein, 107 aa, synthetic construct [sequence omitted]

SEQ ID NO: 5257 - DNA, 357 bp, synthetic construct; identical to SEQ ID NO: 5009
  source 1..357: mol_type = other DNA

SEQ ID NO: 5258 - protein, 119 aa, synthetic construct [sequence omitted]

SEQ ID NO: 5259 - DNA, 321 bp, synthetic construct; identical to SEQ ID NO: 5013
  source 1..321: mol_type = other DNA

SEQ ID NO: 5260 - protein, 107 aa, synthetic construct [sequence omitted]

SEQ ID NO: 5261 - DNA, 360 bp, synthetic construct
  source 1..360: mol_type = other DNA
caagttcagctggtgcagtctggtgcagaagttaagaagccaggggcatcagtaaaggtgtcctgcaaggcttctggctactctttcactgggtatttcataaattgggtgagagaggcccccggccagggcctggaatggatgggccatatttcctcctcttatgcaacttctacatataaccagaagtttcagggcagagtcactttcactgtggacacatccagctctacagcctacatggagctgtcaagcctgagatctgaggacactgcagtctattattgtgtgagaagtggaaactatgaagagtatgctatggactactggggtcaaggaaccctggtcacagtctcctca

SEQ ID NO: 5262 - protein, 120 aa, synthetic construct
QVQLVQSGAEVKKPGASVKVSCKASGYSFTGYFINWVREAPGQGLEWMGHISSSYATSTYNQKFQGRVTFTVDTSSSTAYMELSSLRSEDTAVYYCVRSGNYEEYAMDYWGQGTLVTVSS

SEQ ID NO: 5263 - DNA, 1353 bp, synthetic construct
  source 1..1353: mol_type = other DNA
caagttcagctggtgcagtctggtgcagaagttaagaagccaggggcatcagtaaaggtgtcctgcaaggcttctggctactctttcactgggtatttcataaattgggtgagagaggcccccggccagggcctggaatggatgggccatatttcctcctcttatgcaacttctacatataaccagaagtttcagggcagagtcactttcactgtggacacatccagctctacagcctacatggagctgtcaagcctgagatctgaggacactgcagtctattattgtgtgagaagtggaaactatgaagagtatgctatggactactggggtcaaggaaccctggtcacagtctcctcagcctctaccaagggcccatctgtcttccccctggcaccctcctccaagagcacctctgggggcacagcagccctgggctgcctggtcaaggactacttccctgaacctgtgacagtctcttggaactcaggggccctgacctctggggtgcacaccttcccagctgtcctacagtcctcaggactctactccctctcttctgtggtgacagtgccctccagcagcttgggcacccagacctacatctgcaatgtgaatcacaagcccagcaacaccaaggtggacaagaaagttgagccccccaaatcttgtgacaaaactcacacatgcccaccctgcccagcacctgaactcctggggggaccctcagtcttcctcttccccccaaaacccaaggacaccctcatgatctccagaacccctgaggtcacatgtgtggtggtggatgtgagccatgaagaccctgaggtcaagttcaactggtatgtggatggggtggaggtgcataatgccaagacaaagcccagagaggagcagtacaacagcacctacagagtggtctcagtcctcactgtcctgcaccaggactggctgaatggcaaggagtacaagtgcaaggtctccaacaaagccctcccagcccccatagagaaaaccatctccaaagccaaagggcagcccagagaaccacaggtgtacaccctgcccccatccagagatgagctgaccaagaaccaggtcagcctgacctgcctggtcaaaggcttctatccctctgacattgctgtggagtgggagagcaatgggcagccagagaacaactacaagaccacccctccagtgctggactctgatggctccttcttcctctacagcaagctcacagtggacaagagcaggtggcagcaggggaatgtcttctcatgctctgtgatgcatgaggctctgcacaaccactacactcagaagagcctctccctgtctcctggtaaa

SEQ ID NO: 5264 - protein, 615 aa, synthetic construct
QVQLVQSGAEVKKPGASVKVSCKASGYSFTGYFINWVREAPGQGLEWMGHISSSYATSTYNQKFQGRVTFTVDTSSSTAYMELSSLRSEDTAVYYCVRSGNYEEYAMDYWGQGTLVTVSSASTKGPSVFPLAPSSKSTSGGTAALGCLVKDYFPEPVTVSWNSGALTSGVHTFPAVLQSSGLYSLSSVVTVPSSSLGTQTYICNVNHKPSNTKVDKKVEPPKSCDKTHTCPPCPAPELLGGPSVFLFPPKPKDTLMISRTPEVTCVVVDVSHEDPEVKFNWYVDGVEVHNAKTKPREEQYNSTYRVVSVLTVLHQDWLNGKEYKCKVSNKALPAPIEKTISKAKGQPREPQVYTLPPSRDELTKNQVSLTCLVKGFYPSDIAVEWESNGQPENNYKTTPPVLDSDGSFFLYSKLTVDKSRWQQGNVFSCSVMHEALHNHYTQKSLSLSPGKRKRREGRGSLLTCGDVEENPGPMDMRVPAQLLGLLLLWLSGARCEVQLVESGGGLVQPGGSLRLSCAASGFNIKDTYIHWVRQAPGKGLEWVARIYPTNGYTRYADSVKGRFTISADTSKNTAYLQMNSLRAEDTAVYYCSRWGGDGFYAMDYWGQGTLVTVSS

SEQ ID NO: 5265 - DNA, 321 bp, synthetic construct
  source 1..321: mol_type = other DNA
gatatccagatgacccagtccccaagctccctgtctgcctctgtgggggatagggtcaccatcacctgcagagccagtcaggatgtgaatactgctgtagcctggtatcaacagaaaccaggaaaagctcccaaactactgatttactctgcatccttcctctactctggagtcccttctagattctctggatccagatctggcactgacttcactctgaccatcagtagtctgcagcctgaagactttgcaacttattactgtcaacaacattatactactcctcccacctttggacagggtaccaaggtggagatcaaa

SEQ ID NO: 5266 - protein, 107 aa, synthetic construct [sequence omitted]

SEQ ID NO: 5267 - DNA, 660 bp, synthetic construct
  source 1..660: mol_type = other DNA
gatattgtactgacccagtcccctgactccctggctgtgtctctgggggaaagggcaaccatcaactgcaggagtagtcagacccttctgtactctaataaccagaaaaactacctggcctggtatcaaaaaaaaccaggacagcctcctaaactactgattagttgggcattcactaggaagtctggagtccctgacaggttctctggatctgggtctggaacagatttcacactgaccatcagcagtctgcaggctgaagatgttgcagtctactactgtcagcaatactcaaactacccttggacttttggacaggggaccaaagtggagatcaaaaggactgtcgctgcaccatctgtcttcatcttcccaccatctgatgagcagttgaaatctggaactgcctctgttaagtgcctgctgaataacttctatcccagagaggccaaagtacagtggaaggtggataatgccctccaaagtggtaactcccaggagagtgtcacagagcaggacagcaaggacagcacctacagcctcagcagcaccctgaccctgagcaaagcagactatgagaaacacaaagtctatgcctgtgaagtcacccatcagggcctgagcagcccagtcacaaagagcttcaacaggggagagtgt

SEQ ID NO: 5268 - protein, 220 aa, synthetic construct
DIVLTQSPDSLAVSLGERATINCRSSQTLLYSNNQKNYLAWYQKKPGQPPKLLISWAFTRKSGVPDRFSGSGSGTDFTLTISSLQAEDVAVYYCQQYSNYPWTFGQGTKVEIKRTVAAPSVFIFPPSDEQLKSGTASVKCLLNNFYPREAKVQWKVDNALQSGNSQESVTEQDSKDSTYSLSSTLTLSKADYEKHKVYACEVTHQGLSSPVTKSFNRGEC

SEQ ID NO: 5269 - DNA, 360 bp, synthetic construct
  source 1..360: mol_type = other DNA
gaggttcagctggtggagtctggaggtggcctggtgcagccagggggctcactcagattgtcctgtgcagcttctggcttcaacattaaagacacctatatacactgggtgagacaggccccaggtaagggcctggaatgggttgcaaggatttatcctaccaatggttatactagatatgctgattctgtcaagggcagattcactatatctgcagacacatccaaaaacacagcctacctgcagatgaacagcctgagagctgaggacactgctgtctattattgttctagatggggaggggatggcttctatgctatggactactggggtcaaggaaccctggtcacagtctcctct

SEQ ID NO: 5270 - protein, 120 aa, synthetic construct [sequence omitted]

SEQ ID NO: 5271 - DNA, 1350 bp, synthetic construct
  source 1..1350: mol_type = other DNA
gaggttcagctggtggagtctggaggtggcctggtgcagccagggggctcactcagattgtcctgtgcagcttctggcttcaacattaaagacacctatatacactgggtgagacaggccccaggtaagggcctggaatgggttgcaaggatttatcctaccaatggttatactagatatgctgattctgtcaagggcagattcactatatctgcagacacatccaaaaacacagcctacctgcagatgaacagcctgagagctgaggacactgctgtctattattgttctagatggggaggggatggcttctatgctatggactactggggtcaaggaaccctggtcacagtctcctctgcctctaccaagggcccatctgtcttccccctggcaccctcctccaagagcacctctgggggcacagctgccctgggctgcctggtcaaggactacttccctgaacctgtgacagtctcctggaactcaggagccctgaccagtggagtgcacaccttccctgctgtcctacagtcctcaggactctactccctcagctctgtggtgacagtgccctccagcagcttgggcacccagacctacatctgcaatgtgaatcacaagcccagcaacaccaaggtggacaagagagttgagcccaaatcttgtgacaaaactcacacatgcccaccttgcccagcacctgaactggtggggggaccatcagtcttcctcctccccccaaaacccaaggacaccctcatgatctccagaacccctgaggtcacatgtgtggtggtggatgtgagccatgaagaccctgaggtcaagttcaactggtatgtggatggagtggaggtgcataatgccaagacaaagccccctgaggagcagtacaacagcactctcagagtggtctctgtcctcacagtcctgcaccaggactggctgaatggcaaggagtacaagtgcaaggtctccaacaaagccctcccagcccccattgagaaaaccatctccaaagccaaagggcagcccagagaaccacaggtgtacaccctgcccccatccagagatgagctgaccaagaaccaggtcagcctgacctgcctggtcaaaggcttctatccctctgacattgctgtggagtgggagagcaatgggcagcctgagaacaactacaagaccacacctcttgtgctggactctgatggctccttcttcctctacagcaagctcacagtggacaagagcaggtggcagcaggggaatgtcttctcatgctctgtgatgcatgaggctctgcacaaccactacacccagaagagcctctccctgtctccaggtaaa

SEQ ID NO: 5272 - protein, 450 aa, synthetic construct; identical to SEQ ID NO: 5112

SEQ ID NO: 5273 - DNA, 321 bp, synthetic construct
  source 1..321: mol_type = other DNA
gatatccagatgacccagtcccctagctccctgtctgcctctgtgggagatagggtcaccatcacctgcagagccagtcaggatgtgaatactgctgtagcctggtatcaacagaaaccaggaaaagctcctaaactactgatttactctgcatccttcctctactctggagtcccttctaggttctctggatccagatctgggactgatttcactctgaccatcagcagtctgcagccagaagactttgcaacttattactgtcagcaacattatactactcctcccacttttggacagggtaccaaggtggagatcaaa

SEQ ID NO: 5274 - protein, 107 aa, synthetic construct [sequence omitted]

SEQ ID NO: 5275 - DNA, 642 bp, synthetic construct
  source 1..642: mol_type = other DNA
gatatccagatgacccagtcccctagctccctgtctgcctctgtgggagatagggtcaccatcacctgcagagccagtcaggatgtgaatactgctgtagcctggtatcaacagaaaccaggaaaagctcctaaactactgatttactctgcatccttcctctactctggagtcccttctaggttctctggatccagatctgggactgatttcactctgaccatcagcagtctgcagccagaagactttgcaacttattactgtcagcaacattatactactcctcccacttttggacagggtaccaaggtggagatcaaaagaactgtggctgcaccatctgtcttcatcttcccaccatctgatgagcagttgaaatctggaactgcctctgttgtgtgcctgctgaataacttctatcccagagaggccaaagtacagtggaaggtggataatgccctccaatcaggtaactcccaggagagtgtcacagagcaggacagcaaggacagcacctacagcctcagcagcaccctgactctgagcaaagcagactatgagaaacacaaagtctatgcctgtgaagtcacccatcagggcctgagctctcctgtcacaaagagcttcaacaggggagagtgt

SEQ ID NO: 5276 - protein, 214 aa, synthetic construct; identical to SEQ ID NO: 5036

SEQ ID NO: 5277 - DNA, 696 bp, synthetic construct
  source 1..696: mol_type = other DNA
gagcccaaatcttgtgacaaaacttacacatgcccaccgtgcccagcacctgaactcgtggggggaccgtcagtcttcctcctccccccaaaacccaaggacaccctcatgatctcccggacccctgaggtcacatgcgtggtggtggacgtgagccacgaagaccctgaggtcaagttcaactggtacgtggacggcgtggaggtgcataatgccaagacaaagccgccggaggagcagtacaacagcacgctccgtgtggtcagcgtcctcaccgtcctgcaccaggactggctgaatggcaaggagtacaagtgcaaggtctccaacaaagccctcccagcccccatcgagaaaaccatctccaaagccaaagggcagccccgagaaccacaggtgtacaccctgcccccatcccgggatgagctgaccaagaaccaggtcagcctgacctgcctggtcaaaggcttctatcccagcgacatcgccgtggagtgggagagcaatgggcagccggagaacaactacaagaccacgcctctcgtgctggactccgacggctccttcttcctctacagcaagctcaccgtggacaagagcaggtggcagcaggggaacgtcttctcatgctccgtgatgcatgaggctctgcacaaccactacacgcagaagagcctctccctgtctccgggtaaa

SEQ ID NO: 5278 - protein, 232 aa, synthetic construct
EPKSCDKTYTCPPCPAPELVGGPSVFLLPPKPKDTLMISRTPEVTCVVVDVSHEDPEVKFNWYVDGVEVHNAKTKPPEEQYNSTLRVVSVLTVLHQDWLNGKEYKCKVSNKALPAPIEKTISKAKGQPREPQVYTLPPSRDELTKNQVSLTCLVKGFYPSDIAVEWESNGQPENNYKTTPLVLDSDGSFFLYSKLTVDKSRWQQGNVFSCSVMHEALHNHYTQKSLSLSPGK

SEQ ID NO: 5279 - DNA, 696 bp, synthetic construct; identical to SEQ ID NO: 5277
  source 1..696: mol_type = other DNA

SEQ ID NO: 5280 - protein, 232 aa, synthetic construct; identical to SEQ ID NO: 5278

SEQ ID NO: 5281 - protein, 5 aa, synthetic construct
DTYIH

SEQ ID NO: 5282 - protein, 17 aa, synthetic construct
RIYPTNGYTRYADSVKG

SEQ ID NO: 5283 - protein, 11 aa, synthetic construct
WGGDGFYAMDY

SEQ ID NO: 5284 - protein, 7 aa, synthetic construct
GFNIKDT

SEQ ID NO: 5285 - protein, 6 aa, synthetic construct
YPTNGY

SEQ ID NO: 5286 - protein, 11 aa, synthetic construct
WGGDGFYAMDY

SEQ ID NO: 5287 - protein, 11 aa, synthetic construct
RASQDVNTAVA

SEQ ID NO: 5288 - protein, 7 aa, synthetic construct
SASFLYS

SEQ ID NO: 5289 - protein, 9 aa, synthetic construct
QQHYTTPPT

SEQ ID NO: 5290 - protein, 120 aa, synthetic construct [sequence omitted]

SEQ ID NO: 5291 - protein, 7 aa, synthetic construct
SASFLYS

SEQ ID NO: 5292 - protein, 9 aa, synthetic construct
QQHYTTPPT

SEQ ID NO: 5293 - protein, 5 aa, synthetic construct
DTYIH

SEQ ID NO: 5294 - protein, 17 aa, synthetic construct
RIYPTNGYTRYADSVKG

SEQ ID NO: 5295 - protein, 11 aa, synthetic construct
WGGDGFYAMDY

SEQ ID NO: 5296 - protein, 7 aa, synthetic construct
GFNIKDT

SEQ ID NO: 5297 - protein, 6 aa, synthetic construct
YPTNGY

SEQ ID NO: 5298 - protein, 11 aa, synthetic construct
WGGDGFYAMDY

SEQ ID NO: 5299 - protein, 11 aa, synthetic construct
RASQDVNTAVA

SEQ ID NO: 5300 - protein, 7 aa, synthetic construct
SASFLYS

SEQ ID NO: 5301 - protein, 9 aa, synthetic construct
QQHYTTPPT

SEQ ID NO: 5302 - protein, 11 aa, synthetic construct
RASQDVNTAVA

SEQ ID NO: 5303 - protein, 7 aa, synthetic construct
SASFLYS

SEQ ID NO: 5304 - protein, 9 aa, synthetic construct
QQHYTTPPT

SEQ ID NO: 5305 - protein, 5 aa, synthetic construct
DYTMD

SEQ ID NO: 5306 - protein, 17 aa, synthetic construct
DVNPNSGGSIYNQRFKG

SEQ ID NO: 5307 - protein, 11 aa, synthetic construct
NLGPSFYFDYW

SEQ ID NO: 5308 - protein, 11 aa, synthetic construct
KASQDVSIGVA

SEQ ID NO: 5309 - protein, 7 aa, synthetic construct
SASYRYT

SEQ ID NO: 5310 - protein, 9 aa, synthetic construct
QQYYIYPYT

SEQ ID NO: 5311 - protein, 5 aa, synthetic construct
GYFIN

SEQ ID NO: 5312 - protein, 16 aa, synthetic construct
HISSSYATSTYNQKFQ

SEQ ID NO: 5313 - protein, 8 aa, synthetic construct
YCVRSGNY

SEQ ID NO: 5314 - protein, 7 aa, synthetic construct
GYSFTGY

SEQ ID NO: 5315 - protein, 5 aa, synthetic construct
SSSYA

SEQ ID NO: 5316 - protein, 8 aa, synthetic construct
YCVRSGNY

SEQ ID NO: 5317 - protein, 11 aa, synthetic construct
RASQDVNTAVA

SEQ ID NO: 5318 - protein, 7 aa, synthetic construct
SASFLYS

SEQ ID NO: 5319 - protein, 9 aa, synthetic construct
QQHYTTPPT

SEQ ID NO: 5320 - protein, 11 aa, synthetic construct
RASQDVNTAVA

SEQ ID NO: 5321 - protein, 7 aa, synthetic construct
SASFLYS

SEQ ID NO: 5322 - protein, 9 aa, synthetic construct
QQHYTTPPT

SEQ ID NO: 5323 - protein, 5 aa, synthetic construct
DTYIH

SEQ ID NO: 5324 - protein, 17 aa, synthetic construct
RIYPTNGYTRYADSVKG

SEQ ID NO: 5325 - protein, 11 aa, synthetic construct
WGGDGFYAMDY

SEQ ID NO: 5326 - protein, 7 aa, synthetic construct
GFNIKDT

SEQ ID NO: 5327 - protein, 6 aa, synthetic construct
YPTNGY

SEQ ID NO: 5328 - skipped

SEQ ID NO: 5329 - protein, 120 aa, synthetic construct [sequence omitted]

SEQ ID NO: 5330 - DNA, 360 bp, synthetic construct
  source 1..360: mol_type = other DNA
gaagtgcagctggtggaaagcggcggaggactggtgcagcctggcggatctctgagactgagctgtgccgccagcggcttcaacatcaaggacacctacatccactgggtgcgccaggcccctggcaagggactggaatgggtggccagaatctaccccaccaacggctacaccagatacgccgacagcgtgaagggccggttcaccatcagcgccgacaccagcaagaacaccgcctacctgcagatgaacagcctgcgggccgaggacaccgccgtgtactactgtagtagatggggaggcgacggcttctacgccatggactattggggccagggcaccctcgtgacagtgtctagt

SEQ ID NO: 5331 - protein, 450 aa, synthetic construct
EVQLVESGGGLVQPGGSLRLSCAASGFNIKDTYIHWVRQAPGKGLEWVARIYPTNGYTRYADSVKGRFTISADTSKNTAYLQMNSLRAEDTAVYYCSRWGGDGFYAMDYWGQGTLVTVSSASTKGPSVFPLAPSSKSTSGGTAALGCLVKDYFPEPVTVSWNSGALTSGVHTFPAVLQSSGLYSLSSVVTVPSSSLGTQTYICNVNHKPSNTKVDKKVEPKSCDKTHTCPPCPAPELLGGPSVFLFPPKPKDTLMISRTPEVTCVVVDVSHEDPEVKFNWYVDGVEVHNAKTKPREEQYNSTYRVVSVLTVLHQDWLNGKEYKCKVSNKALPAPIEKTISKAKGQPREPQVYTLPPSRDELTKNQVSLTCLVKGFYPSDIAVEWESNGQPENNYKTTPPVLDSDGSFFLYSKLTVDKSRWQQGNVFSCSVMHEALHNHYTQKSLSLSPGK

SEQ ID NO: 5332 - DNA, 1350 bp, synthetic construct
  source 1..1350: mol_type = other DNA
gaagtgcagctggtggaaagcggcggaggactggtgcagcctggcggatctctgagactgagctgtgccgccagcggcttcaacatcaaggacacctacatccactgggtgcgccaggcccctggcaagggactggaatgggtggccagaatctaccccaccaacggctacaccagatacgccgacagcgtgaagggccggttcaccatcagcgccgacaccagcaagaacaccgcctacctgcagatgaacagcctgcgggccgaggacaccgccgtgtactactgtagtagatggggaggcgacggcttctacgccatggactattggggccagggcaccctcgtgacagtgtctagtgcgtcgaccaaggggccctcggtcttccccctggcaccctcctccaagagcacctctgggggcacagcggccctgggctgcctggtcaaggactacttccccgaaccggtgacggtgtcgtggaactcaggcgccctgaccagcggcgtgcacaccttcccggctgtcctacagtcctcaggactctactccctcagcagcgtggtgaccgtgccctccagcagcttgggcacccagacctacatctgcaacgtgaatcacaagcccagcaacaccaaggtggacaagaaagttgagcccaaatcttgtgacaaaactcacacatgcccaccgtgcccagcacctgaactcctggggggaccgtcagtcttcctcttccccccaaaacccaaggacaccctcatgatctcccggacccctgaggtcacatgcgtggtggtggacgtgagccacgaagaccctgaggtcaagttcaactggtacgtggacggcgtggaggtgcataatgccaagacaaagccgcgggaggagcagtacaacagcacgtaccgtgtggtcagcgtcctcaccgtcctgcaccaggactggctgaatggcaaggagtacaagtgcaaggtctccaacaaagccctcccagcccccatcgagaaaaccatctccaaagccaaagggcagccccgagaaccacaggtgtacaccctgcccccatcccgggatgagctgaccaagaaccaggtcagcctgacctgcctggtcaaaggcttctatcccagcgacatcgccgtggagtgggagagcaatgggcagccggagaacaactacaagaccacgcctcccgtgctggactccgacggctccttcttcctctacagcaagctcaccgtggacaagagcaggtggcagcaggggaacgtcttctcatgctccgtgatgcatgaggctctgcacaaccactacacgcagaagagcctctccctgtctcccggcaag

SEQ ID NO: 5333 - protein, 11 aa, synthetic construct
RASQDVNTAVA

SEQ ID NO: 5334 - protein, 7 aa, synthetic construct
SASFLYS

SEQ ID NO: 5335 - protein, 9 aa, synthetic construct
QQHYTTPPT

SEQ ID NO: 5336 - protein, 11 aa, synthetic construct
RASQDVNTAVA

SEQ ID NO: 5337 - protein, 7 aa, synthetic construct
SASFLYS

SEQ ID NO: 5338 - protein, 9 aa, synthetic construct
QQHYTTPPT

SEQ ID NO: 5339 - protein, 107 aa, synthetic construct [sequence omitted]

SEQ ID NO: 5340 - DNA, 321 bp, synthetic construct
  source 1..321: mol_type = other DNA
gatatccagatgacccagagccccagcagcctgtctgccagcgtgggcgacagagtgaccatcacctgtagagccagccaggacgtgaacaccgccgtggcctggtatcagcagaagcctggcaaggcccccaagctgctgatctacagcgccagcttcctgtacagcggcgtgcccagcagattcagcggcagcagatccggcaccgacttcaccctgaccatcagctccctgcagcccgaggacttcgccacctactactgccagcagcactacaccaccccccccacatttggccagggcaccaaggtggaaatcaag

SEQ ID NO: 5341 - protein, 214 aa, synthetic construct; identical to SEQ ID NO: 5036

SEQ ID NO: 5342 - DNA, 642 bp, synthetic construct
  source 1..642: mol_type = other DNA
gatatccagatgacccagagccccagcagcctgtctgccagcgtgggcgacagagtgaccatcacctgtagagccagccaggacgtgaacaccgccgtggcctggtatcagcagaagcctggcaaggcccccaagctgctgatctacagcgccagcttcctgtacagcggcgtgcccagcagattcagcggcagcagatccggcaccgacttcaccctgaccatcagctccctgcagcccgaggacttcgccacctactactgccagcagcactacaccaccccccccacatttggccagggcaccaaggtggaaatcaagcgtacggtggctgcaccatctgtcttcatcttcccgccatctgatgagcagttgaaatctggaactgcctctgttgtgtgcctgctgaataacttctaccccagagaagccaaagtgcagtggaaggtggacaacgccctgcagagcggaaacagccaggaaagcgtgacagagcaggattccaaggattccacatacagcctgagcagcacactgacactgtccaaggccgactacgagaagcacaaggtgtacgcctgcgaagtgacacaccagggactgtcctcccctgtgacaaagagcttcaacagaggagaatgc

SEQ ID NO: 5343 - DNA, 3989 bp, synthetic construct
  source 1..3989: mol_type = other DNA
ctgcgcgctcgctcgctcactgaggccgcccgggcaaagcccgggcgtcgggcgacctttggtcgcccggcctcagtgagcgagcgagcgcgcagagagggagtggccaactccatcactaggggttccttgtagttaatgattaacccgccatgctacttatctaccagggtaatggggatcctctagaactatagctagtcgacattgattattgactagttattaatagtaatcaattacggggtcattagttcatagcccatatatggagttccgcgttacataacttacggtaaatggcccgcctggctgaccgcccaacgacccccgcccattgacgtcaataatgacgtatgttcccatagtaacgccaatagggactttccattgacgtcaatgggtggagtatttacggtaaactgcccacttggcagtacatcaagtgtatcatatgccaagtacgccccctattgacgtcaatgacggtaaatggcccgcctggcattatgcccagtacatgaccttatgggactttcctacttggcagtacatctacgtattagtcatcgctattaccatgtcgaggccacgttctgcttcactctccccatctcccccccctccccacccccaattttgtatttatttattttttaattattttgtgcagcgatgggggcggggggggggggcgcgcgccaggcggggcggggcggggcgaggggcggggcggggcgaggcggagaggtgcggcggcagccaatcagagcggcgcgctccgaaagtttccttttatggcgaggcggcggcggcggcggccctataaaaagcgaagcgcgcggcgggcgggagcaagcttcgtttagtgaaccgtcagatcgcctggagacgccatccacgctgttttgacctccatagaagacaccgggaccgatccagcctccgcggattcgaatcccggccgggaacggtgcattggaacgcggattccccgtgccaagagtgacgtaagtaccgcctatagagtctataggcccacaaaaaatgctttcttcttttaatatacttttttgtttatcttatttctaatactttccctaatctctttctttcagggcaataatgatacaatgtatcatgcctctttgcaccattctaaagaataacagtgataatttctgggttaaggcaatagcaatatttctgcatataaatatttctgcatataaattgtaactgatgtaagaggtttcatattgctaatagcagctacaatccagctaccattctgcttttattttatggttgggataaggctggattattctgagtccaagctaggcccttttgctaatcatgttcatacctcttatcttcctcccacagctcctgggcaacgtgctggtctgtgtgctggcccatcactttggcaaagaattgggattcgaaccggtgccgccaccatggactggacctggaggttcctctttgtggtggcagcagctacaggtgtccagtccgaagtgcagctggtggaaagcggcggaggactggtgcagcctggcggatctctgagactgagctgtgccgccagcggcttcaacatcaaggacacctacatccactgggtgcgccaggcccctggcaagggactggaatgggtggccagaatctaccccaccaacggctacaccagatacgccgacagcgtgaagggccggttcaccatcagcgccgacaccagcaagaacaccgcctacctgcagatgaacagcctgcgggccgaggacaccgccgtgtactactgtagtagatggggaggcgacggcttctacgccatggactattggggccagggcaccctcgtgacagtgtctagtgcgtcgaccaaggggccctcggtcttccccctggcaccctcctccaagagcacctctgggggcacagcggccctgggctgcctggtcaaggactacttccccgaaccggtgacggtgtcgtggaactcaggcgccctgaccagcggcgtgcacaccttcccggctgtcctacagtcctcaggactctactccctcagcagcgtggtgaccgtgccctccagcagcttgggcacccagacctacatctgcaacgtgaatcacaagcccagcaacaccaaggtggacaagaaagttgagcccaaatcttgtgacaaaactcacacatgcccaccgtgcccagcacctgaactcctggggggaccgtcagtcttcctcttccccccaaaacccaaggacaccctcatgatctcccggacccctgaggtcacatgcgtggtggtggacgtgagccacgaagaccctgaggtcaagttcaactggtacgtggacggcgtggaggtgcataatgccaagacaaagccgcgggaggagcagtacaacagcacgtaccgtgtggtcagcgtcctcaccgtcctgcaccaggactggctgaatggcaaggagtacaagtgcaaggtctccaacaaagccctcccagcccccatcgagaaaaccatctccaaagccaaagggcagccccgagaaccacaggtgtacaccctgcccccatcccgggatgagctgaccaagaaccaggtcagcctgacctgcctggtcaaaggcttctatcccagcgacatcgccgtggagtgggagagcaatgggcagccggagaacaactacaagaccacgcctcccgtgctggactccgacggctccttcttcctctacagcaagctcaccgtggacaagagcaggtggcagcaggggaacgtcttctcatgctccgtgatgcatgaggctctgcacaaccactacacgcagaagagcctctccctgtctcccggcaagagaaagaggcgagagggcagaggaagtcttctaacatgcggtgacgtggaggagaatcccggccctatggacatgagggtccctgctcagctcctggggctcctgctgctctggctctcaggtgccagatgtgatatccagatgacccagagccccagcagcctgtctgccagcgtgggcgacagagtgaccatcacctgtagagccagccaggacgtgaacaccgccgtggcctggtatcagcagaagcctggcaaggcccccaagctgctgatctacagcgccagcttcctgtacagcggcgtgcccagcagattcagcggcagcagatccggcaccgacttcaccctgaccatcagctccctgcagcccgaggacttcgccacctactactgccagcagcactacaccaccccccccacatttggccagggcaccaaggtggaaatcaagcgtacggtggctgcaccatctgtcttcatcttcccgccatctgatgagcagttgaaatctggaactgcctctgttgtgtgcctgctgaataacttctaccccagagaagccaaagtgcagtggaaggtggacaacgccctgcagagcggaaacagccaggaaagcgtgacagagcaggattccaaggattccacatacagcctgagcagcacactgacactgtccaaggccgactacgagaagcacaaggtgtacgcctgcgaagtgacacaccagggactgtcctcccctgtgacaaagagcttcaacagaggagaatgctagtagtaactcgaggacggggtgaactacgcctgaggatccgatctttttccctctgccaaaaattatggggacatcatgaagccccttgagcatctgacttctggctaataaaggaaatttattttcattgcaatagtgtgttggaattttttgtgtctctcactcggcctaggtagataagtagcatggcgggttaatcattaactacaaggaacccctagtgatggagttggccactccctctctgcgcgctcgctcgctcactgaggccgggcgaccaaaggtcgcccgacgcccgggctttgcccgggcggcctcagtgagcgagcgagcgcgcag

SEQ ID NO: 5344 - DNA, 990 bp, synthetic construct
  source 1..990: mol_type = other DNA
gcgtcgaccaaggggccctcggtcttccccctggcaccctcctccaagagcacctctgggggcacagcggccctgggctgcctggtcaaggactacttccccgaaccggtgacggtgtcgtggaactcaggcgccctgaccagcggcgtgcacaccttcccggctgtcctacagtcctcaggactctactccctcagcagcgtggtgaccgtgccctccagcagcttgggcacccagacctacatctgcaacgtgaatcacaagcccagcaacaccaaggtggacaagaaagttgagcccaaatcttgtgacaaaactcacacatgcccaccgtgcccagcacctgaactcctggggggaccgtcagtcttcctcttccccccaaaacccaaggacaccctcatgatctcccggacccctgaggtcacatgcgtggtggtggacgtgagccacgaagaccctgaggtcaagttcaactggtacgtggacggcgtggaggtgcataatgccaagacaaagccgcgggaggagcagtacaacagcacgtaccgtgtggtcagcgtcctcaccgtcctgcaccaggactggctgaatggcaaggagtacaagtgcaaggtctccaacaaagccctcccagcccccatcgagaaaaccatctccaaagccaaagggcagccccgagaaccacaggtgtacaccctgcccccatcccgggatgagctgaccaagaaccaggtcagcctgacctgcctggtcaaaggcttctatcccagcgacatcgccgtggagtgggagagcaatgggcagccggagaacaactacaagaccacgcctcccgtgctggactccgacggctccttcttcctctacagcaagctcaccgtggacaagagcaggtggcagcaggggaacgtcttctcatgctccgtgatgcatgaggctctgcacaaccactacacgcagaagagcctctccctgtctcccggcaag

SEQ ID NO: 5345 - protein, 330 aa, synthetic construct [sequence omitted]

SEQ ID NO: 5346 - DNA, 321 bp, synthetic construct
  source 1..321: mol_type = other DNA
cgtacggtggctgcaccatctgtcttcatcttcccgccatctgatgagcagttgaaatctggaactgcctctgttgtgtgcctgctgaataacttctaccccagagaagccaaagtgcagtggaaggtggacaacgccctgcagagcggaaacagccaggaaagcgtgacagagcaggattccaaggattccacatacagcctgagcagcacactgacactgtccaaggccgactacgagaagcacaaggtgtacgcctgcgaagtgacacaccagggactgtcctcccctgtgacaaagagcttcaacagaggagaatgc

SEQ ID NO: 5347 - DNA, 45 bp, synthetic construct
  source 1..45: mol_type = other DNA
ggtggtggtggatccggaggaggaggaagtggaggtggaggttct

SEQ ID NO: 5348 - protein, 15 aa, synthetic construct
GGGGSGGGGSGGGGS

SEQ ID NO: 5349 - protein, 241 aa, synthetic construct
EVQLVESGGGLVQPGGSLRLSCAASGFTFTDYTMDWVRQAPGKGLEWVADVNPNSGGSIYNQRFKGRFTLSVDRSKNTLYLQMNSLRAEDTAVYYCARNLGPSFYFDYWGQGTLVTVSSGGGGSGGGGSGGGGSDIQMTQSPSSLSASVGDRVTITCKASQDVSIGVAWYQQKPGKAPKLLIYSASYRYTGVPSRFSGSGSGTDFTLTISSLQPEDFATYYCQQYYIYPYTFGQGTKVEIK

SEQ ID NO: 5350 - DNA, 723 bp, synthetic construct
  source 1..723: mol_type = other DNA
gaggttcagctggtggagtctggcggtggcctggtgcagccagggggctcactccgtttgtcctgtgcagcttctggcttcaccttcaccgactataccatggattgggtgcgtcaggccccgggtaagggcctggaatgggttgcagacgtgaatcctaattctggtggttctatatataatcagcgtttcaagggccgtttcactctgagcgttgaccgttccaaaaacacactgtacctgcagatgaacagcctgcgtgctgaggacactgccgtctattattgtgcaagaaatctggggcctagcttctatttcgactactggggtcaaggaaccctggtcaccgtctcctcgggtggtggtggatccggaggaggaggaagtggaggtggaggttctgatatccagatgacccagtccccgagctccctgtccgcctctgtgggcgatagggtcaccatcacctgcaaagccagtcaggatgtgtccattggggtagcctggtatcaacagaaaccaggaaaagctccgaaactactgatttactcggcatcctatcgctacacgggagtcccttctcgcttctctggatccggttctgggacggatttcactctgaccatcagcagtctgcagccggaagacttcgcaacttattactgtcagcaatactatatctatccttacacgttcggacagggtaccaaggtggagatcaaa

SEQ ID NO: 5351 - protein, 242 aa, synthetic construct
EVQLVESGGGLVQPGGSLRLSCAASGFNIKDTYIHWVRQAPGKGLEWVARIYPTNGYTRYADSVKGRFTISADTSKNTAYLQMNSLRAEDTAVYYCSRWGGDGFYAMDYWGQGTLVTVSSGGGGSGGGGSGGGGSDIQMTQSPSSLSASVGDRVTITCRASQDVNTAVAWYQQKPGKAPKLLIYSASFLYSGVPSRFSGSRSGTDFTLTISSLQPEDFATYYCQQHYTTPPTFGQGTKVEIK

SEQ ID NO: 5352 - DNA, 726 bp, synthetic construct
  source 1..726: mol_type = other DNA
gaggttcagctggtggagtctggcggtggcctggtgcagccagggggctcactccgtttgtcctgtgcagcttctggcttcaacattaaagacacctatatacactgggtgcgtcaggccccgggtaagggcctggaatgggttgcaaggatttatcctacgaatggttatactagatatgccgatagcgtcaagggccgtttcactataagcgcagacacatccaaaaacacagcctacctgcagatgaacagcctgcgtgctgaggacactgccgtctattattgttctagatggggaggggacggcttctatgctatggactactggggtcaaggaaccctggtcaccgtctcctcgggtggtggtggatccggaggaggaggaagtggaggtggaggttctgatatccagatgacccagtccccgagctccctgtccgcctctgtgggcgatagggtcaccatcacctgccgtgccagtcaggatgtgaatactgctgtagcctggtatcaacagaaaccaggaaaagctccgaaactactgatttactcggcatccttcctctactctggagtcccttctcgcttctctggatccagatctgggacggatttcactctgaccatcagcagtctgcagccggaagacttcgcaacttattactgtcagcaacattatactactcctcccacgttcggacagggtaccaaggtggagatcaaa

SEQ ID NO: 5353 - DNA, 339 bp, synthetic construct
  source 1..339: mol_type = other DNA
gatattgtactgacccagtcccctgactccctggctgtgtctctgggggaaagggcaaccatcaactgcaggagtagtcagacccttctgtactctaataaccagaaaaactacctggcctggtatcaaaaaaaaccaggacagcctcctaaactactgattagttgggcattcactaggaagtctggagtccctgacaggttctctggatctgggtctggaacagatttcacactgaccatcagcagtctgcaggctgaagatgttgcagtctactactgtcagcaatactcaaactacccttggacttttggacaggggaccaaagtggagatcaaa

SEQ ID NO: 5354 - protein, 113 aa, synthetic construct
DIVLTQSPDSLAVSLGERATINCRSSQTLLYSNNQKNYLAWYQKKPGQPPKLLISWAFTRKSGVPDRFSGSGSGTDFTLTISSLQAEDVAVYYCQQYSNYPWTFGQGTKVEIK

SEQ ID NO: 5355 - protein, 17 aa, synthetic construct
RSSQTLLYSNNQKNYLA

SEQ ID NO: 5356 - protein, 7 aa, synthetic construct
WAFTRKS

SEQ ID NO: 5357 - protein, 9 aa, synthetic construct
QQYSNYPWT

SEQ ID NO: 5358 - protein, 10 aa, synthetic construct
GYSFTGYFIN

SEQ ID NO: 5359 - protein, 17 aa, synthetic construct
HISSSYATSTYNQKFQG

SEQ ID NO: 5360 - protein, 11 aa, synthetic construct
SGNYEEYAMDY

SEQ ID NO: 5361 - protein, 10 aa, synthetic construct
GFNIKDTYIH

SEQ ID NO: 5362 - protein, 17 aa, synthetic construct
RIYPTNGYTRYADSVKG

SEQ ID NO: 5363 - protein, 11 aa, synthetic construct
WGGDGFYAMDY

SEQ ID NO: 5364 - DNA, 726 bp, synthetic construct
  source 1..726: mol_type = other DNA
gaggttcagctggtggagtctggtggtggcctggtgcagccagggggctcactcagattgtcctgtgcagcttctggcttcaacattaaagacacctatatacactgggtgagacaggcccctggaaagggcctggaatgggttgcaaggatttatcctactaatggttatactagatatgcagatagtgtcaagggcagattcactataagtgcagacacatccaaaaacacagcctacctgcagatgaacagcctgagagctgaggacactgcagtctattattgttctagatggggaggggatggcttctatgctatggactactggggtcaaggaaccctggtcacagtctcctctggtggtggtggatctggaggaggaggaagtggaggtggaggttctgatatccagatgacccagtccccaagctccctgtctgcctctgtgggggatagggtcaccatcacctgcagagccagtcaggatgtgaatactgctgtagcctggtatcaacagaaaccaggaaaagctcccaaactactgatttactctgcatccttcctctactctggagtcccttctagattctctggatccagatctggcactgacttcactctgaccatcagtagtctgcagcctgaagactttgcaacttattactgtcaacaacattatactactcctcccacctttggacagggtaccaaggtggagatcaaa

SEQ ID NO: 5365 - protein, 464 aa, synthetic construct
EVQLVESGGGLVQPGGSLRLSCAASGFNIKDTYIHWVRQAPGKGLEWVARIYPTNGYTRYADSVKGRFTISADTSKNTAYLQMNSLRAEDTAVYYCSRWGGDGFYAMDYWGQGTLVTVSSGGGGSGGGGSGGGGSDIQMTQSPSSLSASVGDRVTITCRASQDVNTAVAWYQQKPGKAPKLLIYSASFLYSGVPSRFSGSRSGTDFTLTISSLQPEDFATYYCQQHYTTPPTFGQGTKVEIKGSDIVLTQSPDSLAVSLGERATINCRSSQTLLYSNNQKNYLAWYQKKPGQPPKLLISWAFTRKSGVPDRFSGSGSGTDFTLTISSLQAEDVAVYYCQQYSNYPWTFGQGTKVEIKRTVAAPSVFIFPPSDEQLKSGTASVKCLLNNFYPREAKVQWKVDNALQSGNSQESVTEQDSKDSTYSLSSTLTLSKADYEKHKVYACEVTHQGLSSPVTKSFNRGEC

SEQ ID NO: 5366 - DNA, 1392 bp, synthetic construct
  source 1..1392: mol_type = other DNA
gaggttcagctggtggagtctggtggtggcctggtgcagccagggggctcactcagattgtcctgtgcagcttctggcttcaacattaaagacacctatatacactgggtgagacaggcccctggaaagggcctggaatgggttgcaaggatttatcctactaatggttatactagatatgcagatagtgtcaagggcagattcactataagtgcagacacatccaaaaacacagcctacctgcagatgaacagcctgagagctgaggacactgcagtctattattgttctagatggggaggggatggcttctatgctatggactactggggtcaaggaaccctggtcacagtctcctctggtggtggtggatctggaggaggaggaagtggaggtggaggttctgatatccagatgacccagtccccaagctccctgtctgcctctgtgggggatagggtcaccatcacctgcagagccagtcaggatgtgaatactgctgtagcctggtatcaacagaaaccaggaaaagctcccaaactactgatttactctgcatccttcctctactctggagtcccttctagattctctggatccagatctggcactgacttcactctgaccatcagtagtctgcagcctgaagactttgcaacttattactgtcaacaacattatactactcctcccacctttggacagggtaccaaggtggagatcaaaggctctgatattgtactgacccagtcccctgactccctggctgtgtctctgggggaaagggcaaccatcaactgcaggagtagtcagacccttctgtactctaataaccagaaaaactacctggcctggtatcaaaaaaaaccaggacagcctcctaaactactgattagttgggcattcactaggaagtctggagtccctgacaggttctctggatctgggtctggaacagatttcacactgaccatcagcagtctgcaggctgaagatgttgcagtctactactgtcagcaatactcaaactacccttggacttttggacaggggaccaaagtggagatcaaaaggactgtcgctgcaccatctgtcttcatcttcccaccatctgatgagcagttgaaatctggaactgcctctgttaagtgcctgctgaataacttctatcccagagaggccaaagtacagtggaaggtggataatgccctccaaagtggtaactcccaggagagtgtcacagagcaggacagcaaggacagcacctacagcctcagcagcaccctgaccctgagcaaagcagactatgagaaacacaaagtctatgcctgtgaagtcacccatcagggcctgagcagcccagtcacaaagagcttcaacaggggagagtgt

SEQ ID NO: 5367 - protein, 120 aa, synthetic construct
EVQLVESGGGLVQPGGSLRLSCAASGFNIKDTYIHWVRQAPGKGLEWVARIYPTNGYTRYADSVKGRFTISADTSKNTAYLQMNSLRAEDTAVYYCSRWGGWGFYAFALWGQGTLVTVSS

SEQ ID NO: 5368 - protein, 450 aa, synthetic construct; identical to SEQ ID NO: 5112

SEQ ID NO: 5369 - DNA, 1350 bp, synthetic construct; identical to SEQ ID NO: 5111
  source 1..1350: mol_type = other DNA

SEQ ID NO: 5370 - protein, 157 aa, synthetic construct
GSDLGKKLLEAARAGQDDEVRILMANGADVNAHDFYGITPLHLAANFGHLEIVEVLLKHGADVNAFDYDNTPLHLAADAGHLEIVEVLLKYGADVNASDRDGHTPLHLAAREGHLEIVEVLLKNGADVNAQDKFGKTAFDISIDNGNEDLAEILQKL

SEQ ID NO: 5371 - DNA, 471 bp, synthetic construct
  source 1..471: mol_type = other DNA
ggctctgatctgggaaaaaagcttctggaggctgccagagctggacaggatgatgaagtgagaatactgatggctaatggtgctgatgtgaatgcccatgatttttatggaatcactcccttacacttagctgccaattttgggcacctggagattgtggaagtgctcctgaagcatggagcagatgtaaatgcatttgattatgataacactccactgcacctggctgcagatgctggacatctggagattgtggaagtactgttaaaatatggagcagatgtgaatgcatctgacagagatggacatacaccactgcacctggcagctagagagggacatcttgaaattgttgaagtcctgcttaagaatggtgctgatgtcaatgcccaggacaagtttgggaagacagcttttgacatttcaattgataatggaaatgaggatctggctgaaatacttcagaaattg

SEQ ID NO: 5372 - protein, 386 aa, synthetic construct
GSDLGKKLLEAARAGQDDEVRILMANGADVNAHDFYGITPLHLAANFGHLEIVEVLLKHGADVNAFDYDNTPLHLAADAGHLEIVEVLLKYGADVNASDRDGHTPLHLAAREGHLEIVEVLLKNGADVNAQDKFGKTAFDISIDNGNEDLAEILQKLGGGGSGGGGSGGGGSDIQMTQSPSSLSASVGDRVTITCRASQDVNTAVAWYQQKPGKAPKLLIYSASFLYSGVPSRFSGSRSGTDFTLTISSLQPEDFATYYCQQHYTTPPTFGQGTKVEIKRTVAAPSVFIFPPSDEQLKSGTASVVCLLNNFYPREAKVQWKVDNALQSGNSQESVTEQDSKDSTYSLSSTLTLSKADYEKHKVYACEVTHQGLSSPVTKSFNRGEC

SEQ ID NO: 5373 - DNA, 1158 bp, synthetic construct
  source 1..1158: mol_type = other DNA
ggctctgatctgggaaaaaagcttctggaggctgccagagctggacaggatgatgaagtgagaatactgatggctaatggtgctgatgtgaatgcccatgatttttatggaatcactcccttacacttagctgccaattttgggcacctggagattgtggaagtgctcctgaagcatggagcagatgtaaatgcatttgattatgataacactccactgcacctggctgcagatgctggacatctggagattgtggaagtactgttaaaatatggagcagatgtgaatgcatctgacagagatggacatacaccactgcacctggcagctagagagggacatcttgaaattgttgaagtcctgcttaagaatggtgctgatgtcaatgcccaggacaagtttgggaagacagcttttgacatttcaattgataatggaaatgaggatctggctgaaatacttcagaaattgggtggtggtggatctggaggaggaggaagtggaggtggaggttctgatatccagatgacccagtccccgagctccctgtccgcctctgtgggcgatagggtcaccatcacctgccgtgccagtcaggatgtgaatactgctgtagcctggtatcaacagaaaccaggaaaagctccgaaactactgatttactcggcatccttcctctactctggagtcccttctcgcttctctggatccagatctgggacggatttcactctgaccatcagcagtctgcagccggaagacttcgcaacttattactgtcagcaacattatactactcctcccacgttcggacagggtaccaaggtggagatcaaacgaactgtggctgcaccatctgtcttcatcttcccgccatctgatgagcagttgaaatctggaactgcctctgttgtgtgcctgctgaataacttctatcccagagaggccaaagtacagtggaaggtggataacgccctccaatcgggtaactcccaggagagtgtcacagagcaggacagcaaggacagcacctacagcctcagcagcaccctgacgctgagcaaagcagactacgagaaacacaaagtctacgcctgcgaagtcacccatcagggcctgagctcgcccgtcacaaagagcttcaacaggggagagtgt

SEQ ID NO: 5374 - DNA, 4505 bp, synthetic construct
  source 1..4505: mol_type = other DNA
ctgcgcgctcgctcgctcactgaggccgcccgggcaaagcccgggcgtcgggcgacctttggtcgcccggcctcagtgagcgagcgagcgcgcagagagggagtggccaactccatcactaggggttccttgtagttaatgattaacccgccatgctacttatctaccagggtaatggggatcctctagaactatagctagtcgacattgattattgactagttattaatagtaatcaattacggggtcattagttcatagcccatatatggagttccgcgttacataacttacggtaaatggcccgcctggctgaccgcccaacgacccccgcccattgacgtcaataatgacgtatgttcccatagtaacgccaatagggactttccattgacgtcaatgggtggagtatttacggtaaactgcccacttggcagtacatcaagtgtatcatatgccaagtacgccccctattgacgtcaatgacggtaaatggcccgcctggcattatgcccagtacatgaccttatgggactttcctacttggcagtacatctacgtattagtcatcgctattaccatgtcgaggccacgttctgcttcactctccccatctcccccccctccccacccccaattttgtatttatttattttttaattattttgtgcagcgatgggggcggggggggggggcgcgcgccaggcggggcggggcggggcgaggggcggggcggggcgaggcggagaggtgcggcggcagccaatcagagcggcgcgctccgaaagtttccttttatggcgaggcggcggcggcggcggccctataaaaagcgaagcgcgcggcgggcgggagcaagcttcgtttagtgaaccgtcagatcgcctggagacgccatccacgctgttttgacctccatagaagacaccgggaccgatccagcctccgcggattcgaatcccggccgggaacggtgcattggaacgcggattccccgtgccaagagtgacgtaagtaccgcctatagagtctataggcccacaaaaaatgctttcttcttttaatatacttttttgtttatcttatttctaatactttccctaatctctttctttcagggcaataatgatacaatgtatcatgcctctttgcaccattctaaagaataacagtgataatttctgggttaaggcaatagcaatatttctgcatataaatatttctgcatataaattgtaactgatgtaagaggtttcatattgctaatagcagctacaatccagctaccattctgcttttattttatggttgggataaggctggattattctgagtccaagctaggcccttttgctaatcatgttcatacctcttatcttcctcccacagctcctgggcaacgtgctggtctgtgtgctggcccatcactttggcaaagaattgggattcgaaccggtgccgccaccatggactggacctggaggttcctctttgtggtggcagcagctacaggtgtccagtccgaggttcagctggtggagtctggcggtggcctggtgcagccagggggctcactccgtttgtcctgtgcagcttctggcttcaacattaaagacacctatatacactgggtgcgtcaggccccgggtaagggcctggaatgggttgcaaggatttatcctacgaatggttatactagatatgccgatagcgtcaagggccgtttcactataagcgcagacacatccaaaaacacagcctacctgcagatgaacagcctgcgtgctgaggacactgccgtctattattgttctagatggggaggggacggcttctatgctatggactactggggtcaaggaaccctggtcaccgtctcctcggcgtcgaccaagggcccatcggtcttccccctggcaccctcctccaagagcacctctgggggcacagcggccctgggctgcctggtcaaggactacttccccgaacctgtgacggtctcgtggaactcaggcgccctgaccagcggcgtgcacaccttcccggctgtcctacagtcctcaggactctactccctcagcagcgtggtgaccgtgccctccagcagcttgggcacccagacctacatctgcaacgtgaatcacaagcccagcaacaccaaggtggacaagagagttgagcccaaatcttgtgacaaaactcacacatgcccaccgtgcccagcacctgaactcgtggggggaccgtcagtcttcctcctccccccaaaacccaaggacaccctcatgatctcccggacccctgaggtcacatgcgtggtggtggacgtgagccacgaagaccctgaggtcaagttcaactggtacgtggacggcgtggaggtgcataatgccaagacaaagccgccggaggagcagtacaacagcacgctccgtgtggtcagcgtcctcaccgtcctgcaccaggactggctgaatggcaaggagtacaagtgcaaggtctccaacaaagccctcccagcccccatcgagaaaaccatctccaaagccaaagggcagccccgagaaccacaggtgtacaccctgcccccatcccgggatgagctgaccaagaaccaggtcagcctgacctgcctggtcaaaggcttctatcccagcgacatcgccgtggagtgggagagcaatgggcagccggagaacaactacaagaccacgcctctcgtgctggactccgacggctccttcttcctctacagcaagctcaccgtggacaagagcaggtggcagcaggggaacgtcttctcatgctccgtgatgcatgaggctctgcacaaccactacacgcagaagagcctctccctgtctccgggtaaaagaaagaggcgagagggcagaggaagtcttctaacatgcggtgacgtggaggagaatcccggccctatggacatgagggtccctgctcagctcctggggctcctgctgctctggctctcaggtgccagatgtggctctgatctgggaaaaaagcttctggaggctgccagagctggacaggatgatgaagtgagaatactgatggctaatggtgctgatgtgaatgcccatgatttttatggaatcactcccttacacttagctgccaattttgggcacctggagattgtggaagtgctcctgaagcatggagcagatgtaaatgcatttgattatgataacactccactgcacctggctgcagatgctggacatctggagattgtggaagtactgttaaaatatggagcagatgtgaatgcatctgacagagatggacatacaccactgcacctggcagctagagagggacatcttgaaattgttgaagtcctgcttaagaatggtgctgatgtcaatgcccaggacaagtttgggaagacagcttttgacatttcaattgataatggaaatgaggatctggctgaaatacttcagaaattgggtggtggtggatctggaggaggaggaagtggaggtggaggttctgatatccagatgacccagtccccgagctccctgtccgcctctgtgggcgatagggtcaccatcacctgccgtgccagtcaggatgtgaatactgctgtagcctggtatcaacagaaaccaggaaaagctccgaaactactgatttactcggcatccttcctctactctggagtcccttctcgcttctctggatccagatctgggacggatttcactctgaccatcagcagtctgcagccggaagacttcgcaacttattactgtcagcaacattatactactcctcccacgttcggacagggtaccaaggtggagatcaaacgaactgtggctgcaccatctgtcttcatcttcccgccatctgatgagcagttgaaatctggaactgcctctgttgtgtgcctgctgaataacttctatcccagagaggccaaagtacagtggaaggtggataacgccctccaatcgggtaactcccaggagagtgtcacagagcaggacagcaaggacagcacctacagcctcagcagcaccctgacgctgagcaaagcagactacgagaaacacaaagtctacgcctgcgaagtcacccatcagggcctgagctcgcccgtcacaaagagcttcaacaggggagagtgttagtagtaactcgaggacggggtgaactacgcctgaggatccgatctttttccctctgccaaaaattatggggacatcatgaagccccttgagcatctgacttctggctaataaaggaaatttattttcattgcaatagtgtgttggaattttttgtgtctctcactcggcctaggtagataagtagcatggcgggttaatcattaactacaaggaacccctagtgatggagttggccactccctctctgcgcgctcgctcgctcactgaggccgggcgaccaaaggtcgcccgacgcccgggctttgcccgggcggcctcagtgagcgagcgagcgcgcag

SEQ ID NO: 5375 - DNA, 4739 bp, synthetic construct
  source 1..4739: mol_type = other DNA
ctgcgcgctcgctcgctcactgaggccgcccgggcaaagcccgggcgtcgggcgacctttggtcgcccggcctcagtgagcgagcgagcgcgcagagagggagtggccaactccatcactaggggttccttgtagttaatgattaacccgccatgctacttatctaccagggtaatggggatcctctagaactatagctagtcgacattgattattgactagttattaatagtaatcaattacggggtcattagttcatagcccatatatggagttccgcgttacataacttacggtaaatggcccgcctggctgaccgcccaacgacccccgcccattgacgtcaataatgacgtatgttcccatagtaacgccaatagggactttccattgacgtcaatgggtggagtatttacggtaaactgcccacttggcagtacatcaagtgtatcatatgccaagtacgccccctattgacgtcaatgacggtaaatggcccgcctggcattatgcccagtacatgaccttatgggactttcctacttggcagtacatctacgtattagtcatcgctattaccatgtcgaggccacgttctgcttcactctccccatctcccccccctccccacccccaattttgtatttatttattttttaattattttgtgcagcgatgggggcggggggggggggcgcgcgccaggcggggcggggcggggcgaggggcggggcggggcgaggcggagaggtgcggcggcagccaatcagagcggcgcgctccgaaagtttccttttatggcgaggcggcggcggcggcggccctataaaaagcgaagcgcgcggcgggcgggagcaagcttcgtttagtgaaccgtcagatcgcctggagacgccatccacgctgttttgacctccatagaagacaccgggaccgatccagcctccgcggattcgaatcccggccgggaacggtgcattggaacgcggattccccgtgccaagagtgacgtaagtaccgcctatagagtctataggcccacaaaaaatgctttcttcttttaatatacttttttgtttatcttatttctaatactttccctaatctctttctttcagggcaataatgatacaatgtatcatgcctctttgcaccattctaaagaataacagtgataatttctgggttaaggcaatagcaatatttctgcatataaatatttctgcatataaattgtaactgatgtaagaggtttcatattgctaatagcagctacaatccagctaccattctgcttttattttatggttgggataaggctggattattctgagtccaagctaggcccttttgctaatcatgttcatacctcttatcttcctcccacagctcctgggcaacgtgctggtctgtgtgctggcccatcactttggcaaagaattgggattcgaaccggtgccgccaccatggactggacctggaggttcctctttgtggtggcagcagctacaggtgtccagtcccaagttcagctggtgcagtctggtgcagaagttaagaagccaggggcatcagtaaaggtgtcctgcaaggcttctggctactctttcactgggtatttcataaattgggtgagagaggcccccggccagggcctggaatggatgggccatatttcctcctcttatgcaacttctacatataaccagaagtttcagggcagagtcactttcactgtggacacatccagctctacagcctacatggagctgtcaagcctgagatctgaggacactgcagtctattattgtgtgagaagtggaaactatgaagagtatgctatggactactggggtcaaggaaccctggtcacagtctcctcagcctctaccaagggcccatctgtcttccccctggcaccctcctccaagagcacctctgggggcacagctgccctgggctgcctggtcaaggactacttccctgaacctgtgacagtctcctggaactcaggagccctgaccagtggagtgcacaccttccctgctgtcctacagtcctcaggactctactccctcagctctgtggtgacagtgccctccagcagcttgggcacccagacctacatctgcaatgtgaatcacaagcccagcaacaccaaggtggacaagagagttgagcccaaatcttgtgacaaaactcacacatgcccaccttgcccagcacctgaactggtggggggaccatcagtcttcctcctccccccaaaacccaaggacaccctcatgatctccagaacccctgaggtcacatgtgtggtggtggatgtgagccatgaagaccctgaggtcaagttcaactggtatgtggatggagtggaggtgcataatgccaagacaaagccccctgaggagcagtacaacagcactctcagagtggtctctgtcctcacagtcctgcaccaggactggctgaatggcaaggagtacaagtgcaaggtctccaacaaagccctcccagcccccattgagaaaaccatctccaaagccaaagggcagcccagagaaccacaggtgtacaccctgcccccatccagagatgagctgaccaagaaccaggtcagcctgacctgcctggtcaaaggcttctatccctctgacattgctgtggagtgggagagcaatgggcagcctgagaacaactacaagaccacacctcttgtgctggactctgatggctccttcttcctctacagcaagctcacagtggacaagagcaggtggcagcaggggaatgtcttctcatgctctgtgatgcatgaggctctgcacaaccactacacccagaagagcctctccctgtctccaggtaaaagaaagaggagagagggcagaggaagtcttctaacatgtggtgatgtggaggagaatcctggccctatggacatgagggtccctgctcagctcctggggctcctgctgctctggctctcaggtgccagatgtgaggttcagctggtggagtctggtggtggcctggtgcagccagggggctcactcagattgtcctgtgcagcttctggcttcaacattaaagacacctatatacactgggtgagacaggcccctggaaagggcctggaatgggttgcaaggatttatcctactaatggttatactagatatgcagatagtgtcaagggcagattcactataagtgcagacacatccaaaaacacagcctacctgcagatgaacagcctgagagctgaggacactgcagtctattattgttctagatggggaggggatggcttctatgctatggactactggggtcaaggaaccctggtcacagtctcctctggtggtggtggatctggaggaggaggaagtggaggtggaggttctgatatccagatgacccagtccccaagctccctgtctgcctctgtgggggatagggtcaccatcacctgcagagccagtcaggatgtgaatactgctgtagcctggtatcaacagaaaccaggaaaagctcccaaactactgatttactctgcatccttcctctactctggagtcccttctagattctctggatccagatctggcactgacttcactctgaccatcagtagtctgcagcctgaagactttgcaacttattactgtcaacaacattatactactcctcccacctttggacagggtaccaaggtggagatcaaaggctctgatattgtactgacccagtcccctgactccctggctgtgtctctgggggaaagggcaaccatcaactgcaggagtagtcagacccttctgtactctaataaccagaaaaactacctggcctggtatcaaaaaaaaccaggacagcctcctaaactactgattagttgggcattcactaggaagtctggagtccctgacaggttctctggatctgggtctggaacagatttcacactgaccatcagcagtctgcaggctgaagatgttgcagtctactactgtcagcaatactcaaactacccttggacttttggacaggggaccaaagtggagatcaaaaggactgtcgctgcaccatctgtcttcatcttcccaccatctgatgagcagttgaaatctggaactgcctctgttaagtgcctgctgaataacttctatcccagagaggccaaagtacagtggaaggtggataatgccctccaaagtggtaactcccaggagagtgtcacagagcaggacagcaaggacagcacctacagcctcagcagcaccctgaccctgagcaaagcagactatgagaaacacaaagtctatgcctgtgaagtcacccatcagggcctgagcagcccagtcacaaagagcttcaacaggggagagtgttagtagtaactcgaggacggggtgaactacgcctgaggatccgatctttttccctctgccaaaaattatggggacatcatgaagccccttgagcatctgacttctggctaataaaggaaatttattttcattgcaatagtgtgttggaattttttgtgtctctcactcggcctaggtagataagtagcatggcgggttaatcattaactacaaggaacccctagtgatggagttggccactccctctctgcgcgctcgctcgctcactgaggccgggcgaccaaaggtcgcccgacgcccgggctttgcccgggcggcctcagtgagcgagcgagcgcgcag

SEQ ID NO: 5376 - protein, 450 aa, synthetic construct
QVQLVQSGAEVKKPGASVKVSCKASGYSFTGYFINWVREAPGQGLEWMGHISSSYATSTYNQKFQGRVTFTVDTSSSTAYMELSSLRSEDTAVYYCVRSGNYEEYAMDYWGQGTLVTVSSASTKGPSVFPLAPSSKSTSGGTAALGCLVKDYFPEPVTVSWNSGALTSGVHTFPAVLQSSGLYSLSSVVTVPSSSLGTQTYICNVNHKPSNTKVDKRVEPKSCDKTHTCPPCPAPELVGGPSVFLLPPKPKDTLMISRTPEVTCVVVDVSHEDPEVKFNWYVDGVEVHNAKTKPPEEQYNSTLRVVSVLTVLHQDWLNGKEYKCKVSNKALPAPIEKTISKAKGQPREPQVYTLPPSRDELTKNQVSLTCLVKGFYPSDIAVEWESNGQPENNYKTTPLVLDSDGSFFLYSKLTVDKSRWQQGNVFSCSVMHEALHNHYTQKSLSLSPGK

SEQ ID NO: 5377 - DNA, 1350 bp, synthetic construct
  source 1..1350: mol_type = other DNA
caagttcagctggtgcagtctggtgcagaagttaagaagccaggggcatcagtaaaggtgtcctgcaaggcttctggctactctttcactgggtatttcataaattgggtgagagaggcccccggccagggcctggaatggatgggccatatttcctcctcttatgcaacttctacatataaccagaagtttcagggcagagtcactttcactgtggacacatccagctctacagcctacatggagctgtcaagcctgagatctgaggacactgcagtctattattgtgtgagaagtggaaactatgaagagtatgctatggactactggggtcaaggaaccctggtcacagtctcctcagcctctaccaagggcccatctgtcttccccctggcaccctcctccaagagcacctctgggggcacagctgccctgggctgcctggtcaaggactacttccctgaacctgtgacagtctcctggaactcaggagccctgaccagtggagtgcacaccttccctgctgtcctacagtcctcaggactctactccctcagctctgtggtgacagtgccctccagcagcttgggcacccagacctacatctgcaatgtgaatcacaagcccagcaacaccaaggtggacaagagagttgagcccaaatcttgtgacaaaactcacacatgcccaccttgcccagcacctgaactggtggggggaccatcagtcttcctcctccccccaaaacccaaggacaccctcatgatctccagaacccctgaggtcacatgtgtggtggtggatgtgagccatgaagaccctgaggtcaagttcaactggtatgtggatggagtggaggtgcataatgccaagacaaagccccctgaggagcagtacaacagcactctcagagtggtctctgtcctcacagtcctgcaccaggactggctgaatggcaaggagtacaagtgcaaggtctccaacaaagccctcccagcccccattgagaaaaccatctccaaagccaaagggcagcccagagaaccacaggtgtacaccctgcccccatccagagatgagctgaccaagaaccaggtcagcctgacctgcctggtcaaaggcttctatccctctgacattgctgtggagtgggagagcaatgggcagcctgagaacaactacaagaccacacctcttgtgctggactctgatggctccttcttcctctacagcaagctcacagtggacaagagcaggtggcagcaggggaatgtcttctcatgctctgtgatgcatgaggctctgcacaaccactacacccagaagagcctctccctgtctccaggtaaa

SEQ ID NO: 5378-6400 - skipped (1023 entries)

SEQ ID NO: 6401 - protein, 11 aa, synthetic construct
EKMSGSPHSKA

SEQ ID NO: 6402 - protein, 11 aa, synthetic construct
HDSPHSKAQNL

SEQ ID NO: 6403 - protein, 11 aa, synthetic construct
VNGHDSPHSKA

SEQ ID NO: 6404-6405 - skipped (2 entries)

SEQ ID NO: 6406 - protein, 8 aa, synthetic construct
GSGQNQQT

SEQ ID NO: 6407-6499 - skipped (93 entries)

SEQ ID NO: 6500 - DNA, 3989 bp, synthetic construct
  source 1..3989: mol_type = other DNA
ctgcgcgctcgctcgctcactgaggccgcccgggcaaagcccgggcgtcgggcgacctttggtcgcccggcctcagtgagcgagcgagcgcgcagagagggagtggccaactccatcactaggggttccttgtagttaatgattaacccgccatgctacttatctaccagggtaatggggatcctctagaactatagctagtcgacattgattattgactagttattaatagtaatcaattacggggtcattagttcatagcccatatatggagttccgcgttacataacttacggtaaatggcccgcctggctgaccgcccaacgacccccgcccattgacgtcaataatgacgtatgttcccatagtaacgccaatagggactttccattgacgtcaatgggtggagtatttacggtaaactgcccacttggcagtacatcaagtgtatcatatgccaagtacgccccctattgacgtcaatgacggtaaatggcccgcctggcattatgcccagtacatgaccttatgggactttcctacttggcagtacatctacgtattagtcatcgctattaccatgtcgaggccacgttctgcttcactctccccatctcccccccctccccacccccaattttgtatttatttattttttaattattttgtgcagcgatgggggcggggggggggggcgcgcgccaggcggggcggggcggggcgaggggcggggcggggcgaggcggagaggtgcggcggcagccaatcagagcggcgcgctccgaaagtttccttttatggcgaggcggcggcggcggcggccctataaaaagcgaagcgcgcggcgggcgggagcaagcttcgtttagtgaaccgtcagatcgcctggagacgccatccacgctgttttgacctccatagaagacaccgggaccgatccagcctccgcggattcgaatcccggccgggaacggtgcattggaacgcggattccccgtgccaagagtgacgtaagtaccgcctatagagtctataggcccacaaaaaatgctttcttcttttaatatacttttttgtttatcttatttctaatactttccctaatctctttctttcagggcaataatgatacaatgtatcatgcctctttgcaccattctaaagaataacagtgataatttctgggttaaggcaatagcaatatttctgcatataaatatttctgcatataaattgtaactgatgtaagaggtttcatattgctaatagcagctacaatccagctaccattctgcttttattttatggttgggataaggctggattattctgagtccaagctaggcccttttgctaatcatgttcatacctcttatcttcctcccacagctcctgggcaacgtgctggtctgtgtgctggcccatcactttggcaaagaattgggattcgaaccggtgccgccaccatggactggacctggaggttcctctttgtggtggcagcagctacaggtgtccagtctgaggttcagctggtggagtctggaggtggcctggtgcagccagggggctcactcagattgtcctgtgcagcttctggcttcaacattaaagacacctatatacactgggtgagacaggccccaggtaagggcctggaatgggttgcaaggatttatcctaccaatggttatactagatatgctgattctgtcaagggcagattcactatatctgcagacacatccaaaaacacagcctacctgcagatgaacagcctgagagctgaggacactgctgtctattattgttctagatggggagggtggggcttctatgcttttgccctgtggggtcaaggaaccctggtcacagtctcctctgcctctaccaagggcccatctgtcttccccctggcaccctcctccaagagcacctctgggggcacagctgccctgggctgcctggtcaaggactacttccctgaacctgtgacagtctcctggaactcaggagccctgaccagtggagtgcacaccttccctgctgtcctacagtcctcaggactctactccctcagctctgtggtgacagtgccctccagcagcttgggcacccagacctacatctgcaatgtgaatcacaagcccagcaacaccaaggtggacaagagagttgagcccaaatcttgtgacaaaactcacacatgcccaccttgcccagcacctgaactggtggggggaccatcagtcttcctcctccccccaaaacccaaggacaccctcatgatctccagaacccctgaggtcacatgtgtggtggtggatgtgagccatgaagaccctgaggtcaagttcaactggtatgtggatggagtggaggtgcataatgccaagacaaagccccctgaggagcagtacaacagcactctcagagtggtctctgtcctcacagtcctgcaccaggactggctgaatggcaaggagtacaagtgcaaggtctccaacaaagccctcccagcccccattgagaaaaccatctccaaagccaaagggcagcccagagaaccacaggtgtacaccctgcccccatccagagatgagctgaccaagaaccaggtcagcctgacctgcctggtcaaaggcttctatccctctgacattgctgtggagtgggagagcaatgggcagcctgagaacaactacaagaccacacctcttgtgctggactctgatggctccttcttcctctacagcaagctcacagtggacaagagcaggtggcagcaggggaatgtcttctcatgctctgtgatgcatgaggctctgcacaaccactacacccagaagagcctctccctgtctccaggtaaaagaaagaggagagagggcagaggaagtcttctaacatgtggtgatgtggaggagaatcctggccctatggacatgagggtccctgctcagctcctggggctcctgctgctctggctctcaggtgccagatgtgatatccagatgacccagtcccctagctccctgtctgcctctgtgggagatagggtcaccatcacctgcagagccagtcaggatgtgaatactgctgtagcctggtatcaacagaaaccaggaaaagctcctaaactactgatttactctgcatccttcctctactctggagtcccttctaggttctctggatccagatctgggactgatttcactctgaccatcagcagtctgcagccagaagactttgcaacttattactgtcagcaacattatactactcctcccacttttggacagggtaccaaggtggagatcaaaagaactgtggctgcaccatctgtcttcatcttcccaccatctgatgagcagttgaaatctggaactgcctctgttgtgtgcctgctgaataacttctatcccagagaggccaaagtacagtggaaggtggataatgccctccaatcaggtaactcccaggagagtgtcacagagcaggacagcaaggacagcacctacagcctcagcagcaccctgactctgagcaaagcagactatgagaaacacaaagtctatgcctgtgaagtcacccatcagggcctgagctctcctgtcacaaagagcttcaacaggggagagtgttagtagtaactcgaggacggggtgaactacgcctgaggatccgatctttttccctctgccaaaaattatggggacatcatgaagccccttgagcatctgacttctggctaataaaggaaatttattttcattgcaatagtgtgttggaattttttgtgtctctcactcggcctaggtagataagtagcatggcgggttaatcattaactacaaggaacccctagtgatggagttggccactccctctctgcgcgctcgctcgctcactgaggccgggcgaccaaaggtcgcccgacgcccgggctttgcccgggcggcctcagtgagcgagcgagcgcgcag

SEQ ID NO: 6501 - DNA, 3989 bp, synthetic construct
  source 1..3989: mol_type = other DNA
ctgcgcgctcgctcgctcactgaggccgcccgggcaaagcccgggcgtcgggcgacctttggtcgcccggcctcagtgagcgagcgagcgcgcagagagggagtggccaactccatcactaggggttccttgtagttaatgattaacccgccatgctacttatctaccagggtaatggggatcctctagaactatagctagtcgacattgattattgactagttattaatagtaatcaattacggggtcattagttcatagcccatatatggagttccgcgttacataacttacggtaaatggcccgcctggctgaccgcccaacgacccccgcccattgacgtcaataatgacgtatgttcccatagtaacgccaatagggactttccattgacgtcaatgggtggagtatttacggtaaactgcccacttggcagtacatcaagtgtatcatatgccaagtacgccccctattgacgtcaatgacggtaaatggcccgcctggcattatgcccagtacatgaccttatgggactttcctacttggcagtacatctacgtattagtcatcgctattaccatgtcgaggccacgttctgcttcactctccccatctcccccccctccccacccccaattttgtatttatttattttttaattattttgtgcagcgatgggggcggggggggggggcgcgcgccaggcggggcggggcggggcgaggggcggggcggggcgaggcggagaggtgcggcggcagccaatcagagcggcgcgctccgaaagtttccttttatggcgaggcggcggcggcggcggccctataaaaagcgaagcgcgcggcgggcgggagcaagcttcgtttagtgaaccgtcagatcgcctggagacgccatccacgctgttttgacctccatagaagacaccgggaccgatccagcctccgcggattcgaatcccggccgggaacggtgcattggaacgcggattccccgtgccaagagtgacgtaagtaccgcctatagagtctataggcccacaaaaaatgctttcttcttttaatatacttttttgtttatcttatttctaatactttccctaatctctttctttcagggcaataatgatacaatgtatcatgcctctttgcaccattctaaagaataacagtgataatttctgggttaaggcaatagcaatatttctgcatataaatatttctgcatataaattgtaactgatgtaagaggtttcatattgctaatagcagctacaatccagctaccattctgcttttattttatggttgggataaggctggattattctgagtccaagctaggcccttttgctaatcatgttcatacctcttatcttcctcccacagctcctgggcaacgtgctggtctgtgtgctggcccatcactttggcaaagaattgggattcgaaccggtgccgccaccatggactggacctggaggttcctctttgtggtggcagcagctacaggtgtccagtctgaggttcagctggtggagtctggaggtggcctggtgcagccagggggctcactcagattgtcctgtgcagcttctggcttcaacattaaagacacctatatacactgggtgagacaggccccaggtaagggcctggaatgggttgcaaggatttatcctaccaatggttatactagatatgctgattctgtcaagggcagattcactatatctgcagacacatccaaaaacacagcctacctgcagatgaacagcctgagagctgaggacactgctgtctattattgttctagatggggagggtggggcttctatgcttttgcctactggggtcaaggaaccctggtcacagtctcctctgcctctaccaagggcccatctgtcttccccctggcaccctcctccaagagcacctctgggggcacagctgccctgggctgcctggtcaaggactacttccctgaacctgtgacagtctcctggaactcaggagccctgaccagtggagtgcacaccttccctgctgtcctacagtcctcaggactctactccctcagctctgtggtgacagtgccctccagcagcttgggcacccagacctacatctgcaatgtgaatcacaagcccagcaacaccaaggtggacaagagagttgagcccaaatcttgtgacaaaactcacacatgcccaccttgcccagcacctgaactggtggggggaccatcagtcttcctcctccccccaaaacccaaggacaccctcatgatctccagaacccctgaggtcacatgtgtggtggtggatgtgagccatgaagaccctgaggtcaagttcaactggtatgtggatggagtggaggtgcataatgccaagacaaagccccctgaggagcagtacaacagcactctcagagtggtctctgtcctcacagtcctgcaccaggactggctgaatggcaaggagtacaagtgcaaggtctccaacaaagccctcccagcccccattgagaaaaccatctccaaagccaaagggcagcccagagaaccacaggtgtacaccctgcccccatccagagatgagctgaccaagaaccaggtcagcctgacctgcctggtcaaaggcttctatccctctgacattgctgtggagtgggagagcaatgggcagcctgagaacaactacaagaccacacctcttgtgctggactctgatggctccttcttcctctacagcaagctcacagtggacaagagcaggtggcagcaggggaatgtcttctcatgctctgtgatgcatgaggctctgcacaaccactacacccagaagagcctctccctgtctccaggtaaaagaaagaggagagagggcagaggaagtcttctaacatgtggtgatgtggaggagaatcctggccctatggacatgagggtccctgctcagctcctggggctcctgctgctctggctctcaggtgccagatgtgatatccagatgacccagtcccctagctccctgtctgcctctgtgggagatagggtcaccatcacctgcagagccagtcaggatgtgaatactgctgtagcctggtatcaacagaaaccaggaaaagctcctaaactactgatttactctgcatccttcctctactctggagtcccttctaggttctctggatccagatctgggactgatttcactctgaccatcagcagtctgcagccagaagactttgcaacttattactgtcagcaacattatactactcctcccacttttggacagggtaccaaggtggagatcaaaagaactgtggctgcaccatctgtcttcatcttcccaccatctgatgagcagttgaaatctggaactgcctctgttgtgtgcctgctgaataacttctatcccagagaggccaaagtacagtggaaggtggataatgccctccaatcaggtaactcccaggagagtgtcacagagcaggacagcaaggacagcacctacagcctcagcagcaccctgactctgagcaaagcagactatgagaaacacaaagtctatgcctgtgaagtcacccatcagggcctgagctctcctgtcacaaagagcttcaacaggggagagtgttagtagtaactcgaggacggggtgaactacgcctgaggatccgatctttttccctctgccaaaaattatggggacatcatgaagccccttgagcatctgacttctggctaataaaggaaatttattttcattgcaatagtgtgttggaattttttgtgtctctcactcggcctaggtagataagtagcatggcgggttaatcattaactacaaggaacccctagtgatggagttggccactccctctctgcgcgctcgctcgctcactgaggccgggcgaccaaaggtcgcccgacgcccgggctttgcccgggcggcctcagtgagcgagcgagcgcgcag

SEQ ID NO: 6502 - DNA, 3989 bp, synthetic construct
  source 1..3989: mol_type = other DNA
ctgcgcgctcgctcgctcactgaggccgcccgggcaaagcccgggcgtcgggcgacctttggtcgcccggcctcagtgagcgagcgagcgcgcagagagggagtggccaactccatcactaggggttccttgtagttaatgattaacccgccatgctacttatctaccagggtaatggggatcctctagaactatagctagtcgacattgattattgactagttattaatagtaatcaattacggggtcattagttcatagcccatatatggagttccgcgttacataacttacggtaaatggcccgcctggctgaccgcccaacgacccccgcccattgacgtcaataatgacgtatgttcccatagtaacgccaatagggactttccattgacgtcaatgggtggagtatttacggtaaactgcccacttggcagtacatcaagtgtatcatatgccaagtacgccccctattgacgtcaatgacggtaaatggcccgcctggcattatgcccagtacatgaccttatgggactttcctacttggcagtacatctacgtattagtcatcgctattaccatgtcgaggccacgttctgcttcactctccccatctcccccccctccccacccccaattttgtatttatttattttttaattattttgtgcagcgatgggggcggggggggggggcgcgcgccaggcggggcggggcggggcgaggggcggggcggggcgaggcggagaggtgcggcggcagccaatcagagcggcgcgctccgaaagtttccttttatggcgaggcggcggcggcggcggccctataaaaagcgaagcgcgcggcgggcgggagcaagcttcgtttagtgaaccgtcagatcgcctggagacgccatccacgctgttttgacctccatagaagacaccgggaccgatccagcctccgcggattcgaatcccggccgggaacggtgcattggaacgcggattccccgtgccaagagtgacgtaagtaccgcctatagagtctataggcccacaaaaaatgctttcttcttttaatatacttttttgtttatcttatttctaatactttccctaatctctttctttcagggcaataatgatacaatgtatcatgcctctttgcaccattctaaagaataacagtgataatttctgggttaaggcaatagcaatatttctgcatataaatatttctgcatataaattgtaactgatgtaagaggtttcatattgctaatagcagctacaatccagctaccattctgcttttattttatggttgggataaggctggattattctgagtccaagctaggcccttttgctaatcatgttcatacctcttatcttcctcccacagctcctgggcaacgtgctggtctgtgtgctggcccatcactttggcaaagaattgggattcgaaccggtgccgccaccatggactggacctggaggttcctctttgtggtggcagcagctacaggtgtccagtctgaggttcagctggtggagtctggaggtggcctggtgcagccagggggctcactcagattgtcctgtgcagcttctggcttcaacattaaagacacctatatacactgggtgagacaggccccaggtaagggcctggaatgggttgcaaggatttatcctaccaatggttatactagatatgctgattctgtcaagggcagattcactatatctgcagacacatccaaaaacacagcctacctgcagatgaacagcctgagagctgaggacactgctgtctattattgttctagatggggagggtggggcttctatgcttttgacctgtggggtcaaggaaccctggtcacagtctcctctgcctctaccaagggcccatctgtcttccccctggcaccctcctccaagagcacctctgggggcacagctgccctgggctgcctggtcaaggactacttccctgaacctgtgacagtctcctggaactcaggagccctgaccagtggagtgcacaccttccctgctgtcctacagtcctcaggactctactccctcagctctgtggtgacagtgccctccagcagcttgggcacccagacctacatctgcaatgtgaatcacaagcccagcaacaccaaggtggacaagagagttgagcccaaatcttgtgacaaaactcacacatgcccaccttgcccagcacctgaactggtggggggaccatcagtcttcctcctccccccaaaacccaaggacaccctcatgatctccagaacccctgaggtcacatgtgtggtggtggatgtgagccatgaagaccctgaggtcaagttcaactggtatgtggatggagtggaggtgcataatgccaagacaaagccccctgaggagcagtacaacagcactctcagagtggtctctgtcctcacagtcctgcaccaggactggctgaatggcaaggagtacaagtgcaaggtctccaacaaagccctcccagcccccattgagaaaaccatctccaaagccaaagggcagcccagagaaccacaggtgtacaccctgcccccatccagagatgagctgaccaagaaccaggtcagcctgacctgcctggtcaaaggcttctatccctctgacattgctgtggagtgggagagcaatgggcagcctgagaacaactacaagaccacacctcttgtgctggactctgatggctccttcttcctctacagcaagctcacagtggacaagagcaggtggcagcaggggaatgtcttctcatgctctgtgatgcatgaggctctgcacaaccactacacccagaagagcctctccctgtctccaggtaaaagaaagaggagagagggcagaggaagtcttctaacatgtggtgatgtggaggagaatcctggccctatggacatgagggtccctgctcagctcctggggctcctgctgctctggctctcaggtgccagatgtgatatccagatgacccagtcccctagctccctgtctgcctctgtgggagatagggtcaccatcacctgcagagccagtcaggatgtgaatactgctgtagcctggtatcaacagaaaccaggaaaagctcctaaactactgatttactctgcatccttcctctactctggagtcccttctaggttctctggatccagatctgggactgatttcactctgaccatcagcagtctgcagccagaagactttgcaacttattactgtcagcaacattatactactcctcccacttttggacagggtaccaaggtggagatcaaaagaactgtggctgcaccatctgtcttcatcttcccaccatctgatgagcagttgaaatctggaactgcctctgttgtgtgcctgctgaataacttctatcccagagaggccaaagtacagtggaaggtggataatgccctccaatcaggtaactcccaggagagtgtcacagagcaggacagcaaggacagcacctacagcctcagcagcaccctgactctgagcaaagcagactatgagaaacacaaagtctatgcctgtgaagtcacccatcagggcctgagctctcctgtcacaaagagcttcaacaggggagagtgttagtagtaactcgaggacggggtgaactacgcctgaggatccgatctttttccctctgccaaaaattatggggacatcatgaagccccttgagcatctgacttctggctaataaaggaaatttattttcattgcaatagtgtgttggaattttttgtgtctctcactcggcctaggtagataagtagcatggcgggttaatcattaactacaaggaacccctagtgatggagttggccactccctctctgcgcgctcgctcgctcactgaggccgggcgaccaaaggtcgcccgacgcccgggctttgcccgggcggcctcagtgagcgagcgagcgcgcag

SEQ ID NO: 6503 - DNA, 3989 bp, synthetic construct
  source 1..3989: mol_type = other DNA
ctgcgcgctcgctcgctcactgaggccgcccgggcaaagcccgggcgtcgggcgacctttggtcgcccggcctcagtgagcgagcgagcgcgcagagagggagtggccaactccatcactaggggttccttgtagttaatgattaacccgccatgctacttatctaccagggtaatggggatcctctagaactatagctagtcgacattgattattgactagttattaatagtaatcaattacggggtcattagttcatagcccatatatggagttccgcgttacataacttacggtaaatggcccgcctggctgaccgcccaacgacccccgcccattgacgtcaataatgacgtatgttcccatagtaacgccaatagggactttccattgacgtcaatgggtggagtatttacggtaaactgcccacttggcagtacatcaagtgtatcatatgccaagtacgccccctattgacgtcaatgacggtaaatggcccgcctggcattatgcccagtacatgaccttatgggactttcctacttggcagtacatctacgtattagtcatcgctattaccatgtcgaggccacgttctgcttcactctccccatctcccccccctccccacccccaattttgtatttatttattttttaattattttgtgcagcgatgggggcggggggggggggcgcgcgccaggcggggcggggcggggcgaggggcggggcggggcgaggcggagaggtgcggcggcagccaatcagagcggcgcgctccgaaagtttccttttatggcgaggcggcggcggcggcggccctataaaaagcgaagcgcgcggcgggcgggagcaagcttcgtttagtgaaccgtcagatcgcctggagacgccatccacgctgttttgacctccatagaagacaccgggaccgatccagcctccgcggattcgaatcccggccgggaacggtgcattggaacgcggattccccgtgccaagagtgacgtaagtaccgcctatagagtctataggcccacaaaaaatgctttcttcttttaatatacttttttgtttatcttatttctaatactttccctaatctctttctttcagggcaataatgatacaatgtatcatgcctctttgcaccattctaaagaataacagtgataatttctgggttaaggcaatagcaatatttctgcatataaatatttctgcatataaattgtaactgatgtaagaggtttcatattgctaatagcagctacaatccagctaccattctgcttttattttatggttgggataaggctggattattctgagtccaagctaggcccttttgctaatcatgttcatacctcttatcttcctcccacagctcctgggcaacgtgctggtctgtgtgctggcccatcactttggcaaagaattgggattcgaaccggtgccgccaccatggactggacctggaggttcctctttgtggtggcagcagctacaggtgtccagtctgaggttcagctggtggagtctggaggtggcctggtgcagccagggggctcactcagattgtcctgtgcagcttctggcttcaacattaaagacacctatatacactgggtgagacaggccccaggtaagggcctggaatgggttgcaaggatttatcctaccaatggttatactagatatgctgattctgtcaagggcagattcactatatctgcagacacatccaaaaacacagcctacctgcagatgaacagcctgagagctgaggacactgctgtctattattgttctagatggggagggtggggcttctatgctatggccctgtggggtcaaggaaccctggtcacagtctcctctgcctctaccaagggcccatctgtcttccccctggcaccctcctccaagagcacctctgggggcacagctgccctgggctgcctggtcaaggactacttccctgaacctgtgacagtctcctggaactcaggagccctgaccagtggagtgcacaccttccctgctgtcctacagtcctcaggactctactccctcagctctgtggtgacagtgccctccagcagcttgggcacccagacctacatctgcaatgtgaatcacaagcccagcaacaccaaggtggacaagagagttgagcccaaatcttgtgacaaaactcacacatgcccaccttgcccagcacctgaactggtggggggaccatcagtcttcctcctccccccaaaacccaaggacaccctcatgatctccagaacccctgaggtcacatgtgtggtggtggatgtgagccatgaagaccctgaggtcaagttcaactggtatgtggatggagtggaggtgcataatgccaagacaaagccccctgaggagcagtacaacagcactctcagagtggtctctgtcctcacagtcctgcaccaggactggctgaatggcaaggagtacaagtgcaaggtctccaacaaagccctcccagcccccattgagaaaaccatctccaaagccaaagggcagcccagagaaccacaggtgtacaccctgcccccatccagagatgagctgaccaagaaccaggtcagcctgacctgcctggtcaaaggcttctatccctctgacattgctgtggagtgggagagcaatgggcagcctgagaacaactacaagaccacacctcttgtgctggactctgatggctccttcttcctctacagcaagctcacagtggacaagagcaggtggcagcaggggaatgtcttctcatgctctgtgatgcatgaggctctgcacaaccactacacccagaagagcctctccctgtctccaggtaaaagaaagaggagagagggcagaggaagtcttctaacatgtggtgatgtggaggagaatcctggccctatggacatgagggtccctgctcagctcctggggctcctgctgctctggctctcaggtgccagatgtgatatccagatgacccagtcccctagctccctgtctgcctctgtgggagatagggtcaccatcacctgcagagccagtcaggatgtgaatactgctgtagcctggtatcaacagaaaccaggaaaagctcctaaactactgatttactctgcatccttcctctactctggagtcccttctaggttctctggatccagatctgggactgatttcactctgaccatcagcagtctgcagccagaagactttgcaacttattactgtcagcaacattatactactcctcccacttttggacagggtaccaaggtggagatcaaaagaactgtggctgcaccatctgtcttcatcttcccaccatctgatgagcagttgaaatctggaactgcctctgttgtgtgcctgctgaataacttctatcccagagaggccaaagtacagtggaaggtggataatgccctccaatcaggtaactcccaggagagtgtcacagagcaggacagcaaggacagcacctacagcctcagcagcaccctgactctgagcaaagcagactatgagaaacacaaagtctatgcctgtgaagtcacccatcagggcctgagctctcctgtcacaaagagcttcaacaggggagagtgttagtagtaactcgaggacggggtgaactacgcctgaggatccgatctttttccctctgccaaaaattatggggacatcatgaagccccttgagcatctgacttctggctaataaaggaaatttattttcattgcaatagtgtgttggaattttttgtgtctctcactcggcctaggtagataagtagcatggcgggttaatcattaactacaaggaacccctagtgatggagttggccactccctctctgcgcgctcgctcgctcactgaggccgggcgaccaaaggtcgcccgacgcccgggctttgcccgggcggcctcagtgagcgagcgagcgcgcag

SEQ ID NO: 6504 - DNA, 3989 bp, synthetic construct
  source 1..3989: mol_type = other DNA
ctgcgcgctcgctcgctcactgaggccgcccgggcaaagcccgggcgtcgggcgacctttggtcgcccggcctcagtgagcgagcgagcgcgcagagagggagtggccaactccatcactaggggttccttgtagttaatgattaacccgccatgctacttatctaccagggtaatggggatcctctagaactatagctagtcgacattgattattgactagttattaatagtaatcaattacggggtcattagttcatagcccatatatggagttccgcgttacataacttacggtaaatggcccgcctggctgaccgcccaacgacccccgcccattgacgtcaataatgacgtatgttcccatagtaacgccaatagggactttccattgacgtcaatgggtggagtatttacggtaaactgcccacttggcagtacatcaagtgtatcatatgccaagtacgccccctattgacgtcaatgacggtaaatggcccgcctggcattatgcccagtacatgaccttatgggactttcctacttggcagtacatctacgtattagtcatcgctattaccatgtcgaggccacgttctgcttcactctccccatctcccccccctccccacccccaattttgtatttatttattttttaattattttgtgcagcgatgggggcggggggggggggcgcgcgccaggcggggcggggcggggcgaggggcggggcggggcgaggcggagaggtgcggcggcagccaatcagagcggcgcgctccgaaagtttccttttatggcgaggcggcggcggcggcggccctataaaaagcgaagcgcgcggcgggcgggagcaagcttcgtttagtgaaccgtcagatcgcctggagacgccatccacgctgttttgacctccatagaagacaccgggaccgatccagcctccgcggattcgaatcccggccgggaacggtgcattggaacgcggattccccgtgccaagagtgacgtaagtaccgcctatagagtctataggcccacaaaaaatgctttcttcttttaatatacttttttgtttatcttatttctaatactttccctaatctctttctttcagggcaataatgatacaatgtatcatgcctctttgcaccattctaaagaataacagtgataatttctgggttaaggcaatagcaatatttctgcatataaatatttctgcatataaattgtaactgatgtaagaggtttcatattgctaatagcagctacaatccagctaccattctgcttttattttatggttgggataaggctggattattctgagtccaagctaggcccttttgctaatcatgttcatacctcttatcttcctcccacagctcctgggcaacgtgctggtctgtgtgctggcccatcactttggcaaagaattgggattcgaaccggtgccgccaccatggactggacctggaggttcctctttgtggtggcagcagctacaggtgtccagtctgaggttcagctggtggagtctggaggtggcctggtgcagccagggggctcactcagattgtcctgtgcagcttctggcttcaacattaaagacacctatatacactgggtgagacaggccccaggtaagggcctggaatgggttgcaaggatttatcctaccaatggttatactagatatgctgattctgtcaagggcagattcactatatctgcagacacatccaaaaacacagcctacctgcagatgaacagcctgagagctgaggacactgctgtctattattgttctagatggggaggggatggcttctatgcttttgccctgtggggtcaaggaaccctggtcacagtctcctctgcctctaccaagggcccatctgtcttccccctggcaccctcctccaagagcacctctgggggcacagctgccctgggctgcctggtcaaggactacttccctgaacctgtgacagtctcctggaactcaggagccctgaccagtggagtgcacaccttccctgctgtcctacagtcctcaggactctactccctcagctctgtggtgacagtgccctccagcagcttgggcacccagacctacatctgcaatgtgaatcacaagcccagcaacaccaaggtggacaagagagttgagcccaaatcttgtgacaaaactcacacatgcccaccttgcccagcacctgaactggtggggggaccatcagtcttcctcctccccccaaaacccaaggacaccctcatgatctccagaacccctgaggtcacatgtgtggtggtggatgtgagccatgaagaccctgaggtcaagttcaactggtatgtggatggagtggaggtgcataatgccaagacaaagccccctgaggagcagtacaacagcactctcagagtggtctctgtcctcacagtcctgcaccaggactggctgaatggcaaggagtacaagtgcaaggtctccaacaaagccctcccagcccccattgagaaaaccatctccaaagccaaagggcagcccagagaaccacaggtgtacaccctgcccccatccagagatgagctgaccaagaaccaggtcagcctgacctgcctggtcaaaggcttctatccctctgacattgctgtggagtgggagagcaatgggcagcctgagaacaactacaagaccacacctcttgtgctggactctgatggctccttcttcctctacagcaagctcacagtggacaagagcaggtggcagcaggggaatgtcttctcatgctctgtgatgcatgaggctctgcacaaccactacacccagaagagcctctccctgtctccaggtaaaagaaagaggagagagggcagaggaagtcttctaacatgtggtgatgtggaggagaatcctggccctatggacatgagggtccctgctcagctcctggggctcctgctgctctggctctcaggtgccagatgtgatatccagatgacccagtcccctagctccctgtctgcctctgtgggagatagggtcaccatcacctgcagagccagtcaggatgtgaatactgctgtagcctggtatcaacagaaaccaggaaaagctcctaaactactgatttactctgcatccttcctctactctggagtcccttctaggttctctggatccagatctgggactgatttcactctgaccatcagcagtctgcagccagaagactttgcaacttattactgtcagcaacattatactactcctcccacttttggacagggtaccaaggtggagatcaaaagaactgtggctgcaccatctgtcttcatcttcccaccatctgatgagcagttgaaatctggaactgcctctgttgtgtgcctgctgaataacttctatcccagagaggccaaagtacagtggaaggtggataatgccctccaatcaggtaactcccaggagagtgtcacagagcaggacagcaaggacagcacctacagcctcagcagcaccctgactctgagcaaagcagactatgagaaacacaaagtctatgcctgtgaagtcacccatcagggcctgagctctcctgtcacaaagagcttcaacaggggagagtgttagtagtaactcgaggacggggtgaactacgcctgaggatccgatctttttccctctgccaaaaattatggggacatcatgaagccccttgagcatctgacttctggctaataaaggaaatttattttcattgcaatagtgtgttggaattttttgtgtctctcactcggcctaggtagataagtagcatggcgggttaatcattaactacaaggaacccctagtgatggagttggccactccctctctgcgcgctcgctcgctcactgaggccgggcgaccaaaggtcgcccgacgcccgggctttgcccgggcggcctcagtgagcgagcgagcgcgcag

SEQ ID NO: 6505 - DNA, 4739 bp, synthetic construct
  source 1..4739: mol_type = other DNA
ctgcgcgctcgctcgctcactgaggccgcccgggcaaagcccgggcgtcgggcgacctttggtcgcccggcctcagtgagcgagcgagcgcgcagagagggagtggccaactccatcactaggggttccttgtagttaatgattaacccgccatgctacttatctaccagggtaatggggatcctctagaactatagctagtcgacattgattattgactagttattaatagtaatcaattacggggtcattagttcatagcccatatatggagttccgcgttacataacttacggtaaatggcccgcctggctgaccgcccaacgacccccgcccattgacgtcaataatgacgtatgttcccatagtaacgccaatagggactttccattgacgtcaatgggtggagtatttacggtaaactgcccacttggcagtacatcaagtgtatcatatgccaagtacgccccctattgacgtcaatgacggtaaatggcccgcctggcattatgcccagtacatgaccttatgggactttcctacttggcagtacatctacgtattagtcatcgctattaccatgtcgaggccacgttctgcttcactctccccatctcccccccctccccacccccaattttgtatttatttattttttaattattttgtgcagcgatgggggcggggggggggggcgcgcgccaggcggggcggggcggggcgaggggcggggcggggcgaggcggagaggtgcggcggcagccaatcagagcggcgcgctccgaaagtttccttttatggcgaggcggcggcggcggcggccctataaaaagcgaagcgcgcggcgggcgggagcaagcttcgtttagtgaaccgtcagatcgcctggagacgccatccacgctgttttgacctccatagaagacaccgggaccgatccagcctccgcggattcgaatcccggccgggaacggtgcattggaacgcggattccccgtgccaagagtgacgtaagtaccgcctatagagtctataggcccacaaaaaatgctttcttcttttaatatacttttttgtttatcttatttctaatactttccctaatctctttctttcagggcaataatgatacaatgtatcatgcctctttgcaccattctaaagaataacagtgataatttctgggttaaggcaatagcaatatttctgcatataaatatttctgcatataaattgtaactgatgtaagaggtttcatattgctaatagcagctacaatccagctaccattctgcttttattttatggttgggataaggctggattattctgagtccaagctaggcccttttgctaatcatgttcatacctcttatcttcctcccacagctcctgggcaacgtgctggtctgtgtgctggcccatcactttggcaaagaattgggattcgaaccggtgccgccaccatggactggacctggaggttcctctttgtggtggcagcagctacaggtgtccagtcccaagttcagctggtgcagtctggtgcagaagttaagaagccaggggcatcagtaaaggtgtcctgcaaggcttctggctactctttcactgggtatttcataaattgggtgagagaggcccccggccagggcctggaatggatgggccatatttcctcctcttatgcaacttctacatataaccagaagtttcagggcagagtcactttcactgtggacacatccagctctacagcctacatggagctgtcaagcctgagatctgaggacactgcagtctattattgtgtgagaagtggaaactatgaagagtatgctatggactactggggtcaaggaaccctggtcacagtctcctcagcctctaccaagggcccatctgtcttccccctggcaccctcctccaagagcacctctgggggcacagctgccctgggctgcctggtcaaggactacttccctgaacctgtgacagtctcctggaactcaggagccctgaccagtggagtgcacaccttccctgctgtcctacagtcctcaggactctactccctcagctctgtggtgacagtgccctccagcagcttgggcacccagacctacatctgcaatgtgaatcacaagcccagcaacaccaaggtggacaagagagttgagcccaaatcttgtgacaaaactcacacatgcccaccttgcccagcacctgaactggtggggggaccatcagtcttcctcctccccccaaaacccaaggacaccctcatgatctccagaacccctgaggtcacatgtgtggtggtggatgtgagccatgaagaccctgaggtcaagttcaactggtatgtggatggagtggaggtgcataatgccaagacaaagccccctgaggagcagtacaacagcactctcagagtggtctctgtcctcacagtcctgcaccaggactggctgaatggcaaggagtacaagtgcaaggtctccaacaaagccctcccagcccccattgagaaaaccatctccaaagccaaagggcagcccagagaaccacaggtgtacaccctgcccccatccagagatgagctgaccaagaaccaggtcagcctgacctgcctggtcaaaggcttctatccctctgacattgctgtggagtgggagagcaatgggcagcctgagaacaactacaagaccacacctcttgtgctggactctgatggctccttcttcctctacagcaagctcacagtggacaagagcaggtggcagcaggggaatgtcttctcatgctctgtgatgcatgaggctctgcacaaccactacacccagaagagcctctccctgtctccaggtaaaagaaagaggagagagggcagaggaagtcttctaacatgtggtgatgtggaggagaatcctggccctatggacatgagggtccctgctcagctcctggggctcctgctgctctggctctcaggtgccagatgtgaggttcagctggtggagtctggtggtggcctggtgcagccagggggctcactcagattgtcctgtgcagcttctggcttcaacattaaagacacctatatacactgggtgagacaggcccctggaaagggcctggaatgggttgcaaggatttatcctactaatggttatactagatatgcagatagtgtcaagggcagattcactataagtgcagacacatccaaaaacacagcctacctgcagatgaacagcctgagagctgaggacactgcagtctattattgttctagatggggagggtggggcttctatgcttttgccctgtggggtcaaggaaccctggtcacagtctcctctggtggtggtggatctggaggaggaggaagtggaggtggaggttctgatatccagatgacccagtccccaagctccctgtctgcctctgtgggggatagggtcaccatcacctgcagagccagtcaggatgtgaatactgctgtagcctggtatcaacagaaaccaggaaaagctcccaaactactgatttactctgcatccttcctctactctggagtcccttctagattctctggatccagatctggcactgacttcactctgaccatcagtagtctgcagcctgaagactttgcaacttattactgtcaacaacattatactactcctcccacctttggacagggtaccaaggtggagatcaaaggctctgatattgtactgacccagtcccctgactccctggctgtgtctctgggggaaagggcaaccatcaactgcaggagtagtcagacccttctgtactctaataaccagaaaaactacctggcctggtatcaaaaaaaaccaggacagcctcctaaactactgattagttgggcattcactaggaagtctggagtccctgacaggttctctggatctgggtctggaacagatttcacactgaccatcagcagtctgcaggctgaagatgttgcagtctactactgtcagcaatactcaaactacccttggacttttggacaggggaccaaagtggagatcaaaaggactgtcgctgcaccatctgtcttcatcttcccaccatctgatgagcagttgaaatctggaactgcctctgttaagtgcctgctgaataacttctatcccagagaggccaaagtacagtggaaggtggataatgccctccaaagtggtaactcccaggagagtgtcacagagcaggacagcaaggacagcacctacagcctcagcagcaccctgaccctgagcaaagcagactatgagaaacacaaagtctatgcctgtgaagtcacccatcagggcctgagcagcccagtcacaaagagcttcaacaggggagagtgttagtagtaactcgaggacggggtgaactacgcctgaggatccgatctttttccctctgccaaaaattatggggacatcatgaagccccttgagcatctgacttctggctaataaaggaaatttattttcattgcaatagtgtgttggaattttttgtgtctctcactcggcctaggtagataagtagcatggcgggttaatcattaactacaaggaacccctagtgatggagttggccactccctctctgcgcgctcgctcgctcactgaggccgggcgaccaaaggtcgcccgacgcccgggctttgcccgggcggcctcagtgagcgagcgagcgcgcag

SEQ ID NO: 6506 - DNA, 4739 bp, synthetic construct
  source 1..4739: mol_type = other DNA
ctgcgcgctcgctcgctcactgaggccgcccgggcaaagcccgggcgtcgggcgacctttggtcgcccggcctcagtgagcgagcgagcgcgcagagagggagtggccaactccatcactaggggttccttgtagttaatgattaacccgccatgctacttatctaccagggtaatggggatcctctagaactatagctagtcgacattgattattgactagttattaatagtaatcaattacggggtcattagttcatagcccatatatggagttccgcgttacataacttacggtaaatggcccgcctggctgaccgcccaacgacccccgcccattgacgtcaataatgacgtatgttcccatagtaacgccaatagggactttccattgacgtcaatgggtggagtatttacggtaaactgcccacttggcagtacatcaagtgtatcatatgccaagtacgccccctattgacgtcaatgacggtaaatggcccgcctggcattatgcccagtacatgaccttatgggactttcctacttggcagtacatctacgtattagtcatcgctattaccatgtcgaggccacgttctgcttcactctccccatctcccccccctccccacccccaattttgtatttatttattttttaattattttgtgcagcgatgggggcggggggggggggcgcgcgccaggcggggcggggcggggcgaggggcggggcggggcgaggcggagaggtgcggcggcagccaatcagagcggcgcgctccgaaagtttccttttatggcgaggcggcggcggcggcggccctataaaaagcgaagcgcgcggcgggcgggagcaagcttcgtttagtgaaccgtcagatcgcctggagacgccatccacgctgttttgacctccatagaagacaccgggaccgatccagcctccgcggattcgaatcccggccgggaacggtgcattggaacgcggattccccgtgccaagagtgacgtaagtaccgcctatagagtctataggcccacaaaaaatgctttcttcttttaatatacttttttgtttatcttatttctaatactttccctaatctctttctttcagggcaataatgatacaatgtatcatgcctctttgcaccattctaaagaataacagtgataatttctgggttaaggcaatagcaatatttctgcatataaatatttctgcatataaattgtaactgatgtaagaggtttcatattgctaatagcagctacaatccagctaccattctgcttttattttatggttgggataaggctggattattctgagtccaagctaggcccttttgctaatcatgttcatacctcttatcttcctcccacagctcctgggcaacgtgctggtctgtgtgctggcccatcactttggcaaagaattgggattcgaaccggtgccgccaccatggactggacctggaggttcctctttgtggtggcagcagctacaggtgtccagtcccaagttcagctggtgcagtctggtgcagaagttaagaagccaggggcatcagtaaaggtgtcctgcaaggcttctggctactctttcactgggtatttcataaattgggtgagagaggcccccggccagggcctggaatggatgggccatatttcctcctcttatgcaacttctacatataaccagaagtttcagggcagagtcactttcactgtggacacatccagctctacagcctacatggagctgtcaagcctgagatctgaggacactgcagtctattattgtgtgagaagtggaaactatgaagagtatgctatggactactggggtcaaggaaccctggtcacagtctcctcagcctctaccaagggcccatctgtcttccccctggcaccctcctccaagagcacctctgggggcacagctgccctgggctgcctggtcaaggactacttccctgaacctgtgacagtctcctggaactcaggagccctgaccagtggagtgcacaccttccctgctgtcctacagtcctcaggactctactccctcagctctgtggtgacagtgccctccagcagcttgggcacccagacctacatctgcaatgtgaatcacaagcccagcaacaccaaggtggacaagagagttgagcccaaatcttgtgacaaaactcacacatgcccaccttgcccagcacctgaactggtggggggaccatcagtcttcctcctccccccaaaacccaaggacaccctcatgatctccagaacccctgaggtcacatgtgtggtggtggatgtgagccatgaagaccctgaggtcaagttcaactggtatgtggatggagtggaggtgcataatgccaagacaaagccccctgaggagcagtacaacagcactctcagagtggtctctgtcctcacagtcctgcaccaggactggctgaatggcaaggagtacaagtgcaaggtctccaacaaagccctcccagcccccattgagaaaaccatctccaaagccaaagggcagcccagagaaccacaggtgtacaccctgcccccatccagagatgagctgaccaagaaccaggtcagcctgacctgcctggtcaaaggcttctatccctctgacattgctgtggagtgggagagcaatgggcagcctgagaacaactacaagaccacacctcttgtgctggactctgatggctccttcttcctctacagcaagctcacagtggacaagagcaggtggcagcaggggaatgtcttctcatgctctgtgatgcatgaggctctgcacaaccactacacccagaagagcctctccctgtctccaggtaaaagaaagaggagagagggcagaggaagtcttctaacatgtggtgatgtggaggagaatcctggccctatggacatgagggtccctgctcagctcctggggctcctgctgctctggctctcaggtgccagatgtgaggttcagctggtggagtctggtggtggcctggtgcagccagggggctcactcagattgtcctgtgcagcttctggcttcaacattaaagacacctatatacactgggtgagacaggcccctggaaagggcctggaatgggttgcaaggatttatcctactaatggttatactagatatgcagatagtgtcaagggcagattcactataagtgcagacacatccaaaaacacagcctacctgcagatgaacagcctgagagctgaggacactgcagtctattattgttctagatggggagggtggggcttctatgcttttgcctactggggtcaaggaaccctggtcacagtctcctctggtggtggtggatctggaggaggaggaagtggaggtggaggttctgatatccagatgacccagtccccaagctccctgtctgcctctgtgggggatagggtcaccatcacctgcagagccagtcaggatgtgaatactgctgtagcctggtatcaacagaaaccaggaaaagctcccaaactactgatttactctgcatccttcctctactctggagtcccttctagattctctggatccagatctggcactgacttcactctgaccatcagtagtctgcagcctgaagactttgcaacttattactgtcaacaacattatactactcctcccacctttggacagggtaccaaggtggagatcaaaggctctgatattgtactgacccagtcccctgactccctggctgtgtctctgggggaaagggcaaccatcaactgcaggagtagtcagacccttctgtactctaataaccagaaaaactacctggcctggtatcaaaaaaaaccaggacagcctcctaaactactgattagttgggcattcactaggaagtctggagtccctgacaggttctctggatctgggtctggaacagatttcacactgaccatcagcagtctgcaggctgaagatgttgcagtctactactgtcagcaatactcaaactacccttggacttttggacaggggaccaaagtggagatcaaaaggactgtcgctgcaccatctgtcttcatcttcccaccatctgatgagcagttgaaatctggaactgcctctgttaagtgcctgctgaataacttctatcccagagaggccaaagtacagtggaaggtggataatgccctccaaagtggtaactcccaggagagtgtcacagagcaggacagcaaggacagcacctacagcctcagcagcaccctgaccctgagcaaagcagactatgagaaacacaaagtctatgcctgtgaagtcacccatcagggcctgagcagcccagtcacaaagagcttcaacaggggagagtgttagtagtaactcgaggacggggtgaactacgcctgaggatccgatctttttccctctgccaaaaattatggggacatcatgaagccccttgagcatctgacttctggctaataaaggaaatttattttcattgcaatagtgtgttggaattttttgtgtctctcactcggcctaggtagataagtagcatggcgggttaatcattaactacaaggaacccctagtgatggagttggccactccctctctgcgcgctcgctcgctcactgaggccgggcgaccaaaggtcgcccgacgcccgggctttgcccgggcggcctcagtgagcgagcgagcgcgcag

SEQ ID NO: 6507 - DNA, 4739 bp, synthetic construct
  source 1..4739: mol_type = other DNA
ctgcgcgctcgctcgctcactgaggccgcccgggcaaagcccgggcgtcgggcgacctttggtcgcccggcctcagtgagcgagcgagcgcgcagagagggagtggccaactccatcactaggggttccttgtagttaatgattaacccgccatgctacttatctaccagggtaatggggatcctctagaactatagctagtcgacattgattattgactagttattaatagtaatcaattacggggtcattagttcatagcccatatatggagttccgcgttacataacttacggtaaatggcccgcctggctgaccgcccaacgacccccgcccattgacgtcaataatgacgtatgttcccatagtaacgccaatagggactttccattgacgtcaatgggtggagtatttacggtaaactgcccacttggcagtacatcaagtgtatcatatgccaagtacgccccctattgacgtcaatgacggtaaatggcccgcctggcattatgcccagtacatgaccttatgggactttcctacttggcagtacatctacgtattagtcatcgctattaccatgtcgaggccacgttctgcttcactctccccatctcccccccctccccacccccaattttgtatttatttattttttaattattttgtgcagcgatgggggcggggggggggggcgcgcgccaggcggggcggggcggggcgaggggcggggcggggcgaggcggagaggtgcggcggcagccaatcagagcggcgcgctccgaaagtttccttttatggcgaggcggcggcggcggcggccctataaaaagcgaagcgcgcggcgggcgggagcaagcttcgtttagtgaaccgtcagatcgcctggagacgccatccacgctgttttgacctccatagaagacaccgggaccgatccagcctccgcggattcgaatcccggccgggaacggtgcattggaacgcggattccccgtgccaagagtgacgtaagtaccgcctatagagtctataggcccacaaaaaatgctttcttcttttaatatacttttttgtttatcttatttctaatactttccctaatctctttctttcagggcaataatgatacaatgtatcatgcctctttgcaccattctaaagaataacagtgataatttctgggttaaggcaatagcaatatttctgcatataaatatttctgcatataaattgtaactgatgtaagaggtttcatattgctaatagcagctacaatccagctaccattctgcttttattttatggttgggataaggctggattattctgagtccaagctaggcccttttgctaatcatgttcatacctcttatcttcctcccacagctcctgggcaacgtgctggtctgtgtgctggcccatcactttggcaaagaattgggattcgaaccggtgccgccaccatggactggacctggaggttcctctttgtggtggcagcagctacaggtgtccagtcccaagttcagctggtgcagtctggtgcagaagttaagaagccaggggcatcagtaaaggtgtcctgcaaggcttctggctactctttcactgggtatttcataaattgggtgagagaggcccccggccagggcctggaatggatgggccatatttcctcctcttatgcaacttctacatataaccagaagtttcagggcagagtcactttcactgtggacacatccagctctacagcctacatggagctgtcaagcctgagatctgaggacactgcagtctattattgtgtgagaagtggaaactatgaagagtatgctatggactactggggtcaaggaaccctggtcacagtctcctcagcctctaccaagggcccatctgtcttccccctggcaccctcctccaagagcacctctgggggcacagctgccctgggctgcctggtcaaggactacttccctgaacctgtgacagtctcctggaactcaggagccctgaccagtggagtgcacaccttccctgctgtcctacagtcctcaggactctactccctcagctctgtggtgacagtgccctccagcagcttgggcacccagacctacatctgcaatgtgaatcacaagcccagcaacaccaaggtggacaagagagttgagcccaaatcttgtgacaaaactcacacatgcccaccttgcccagcacctgaactggtggggggaccatcagtcttcctcctccccccaaaacccaaggacaccctcatgatctccagaacccctgaggtcacatgtgtggtggtggatgtgagccatgaagaccctgaggtcaagttcaactggtatgtggatggagtggaggtgcataatgccaagacaaagccccctgaggagcagtacaacagcactctcagagtggtctctgtcctcacagtcctgcaccaggactggctgaatggcaaggagtacaagtgcaaggtctccaacaaagccctcccagcccccattgagaaaaccatctccaaagccaaagggcagcccagagaaccacaggtgtacaccctgcccccatccagagatgagctgaccaagaaccaggtcagcctgacctgcctggtcaaaggcttctatccctctgacattgctgtggagtgggagagcaatgggcagcctgagaacaactacaagaccacacctcttgtgctggactctgatggctccttcttcctctacagcaagctcacagtggacaagagcaggtggcagcaggggaatgtcttctcatgctctgtgatgcatgaggctctgcacaaccactacacccagaagagcctctccctgtctccaggtaaaagaaagaggagagagggcagaggaagtcttctaacatgtggtgatgtggaggagaatcctggccctatggacatgagggtccctgctcagctcctggggctcctgctgctctggctctcaggtgccagatgtgaggttcagctggtggagtctggtggtggcctggtgcagccagggggctcactcagattgtcctgtgcagcttctggcttcaacattaaagacacctatatacactgggtgagacaggcccctggaaagggcctggaatgggttgcaaggatttatcctactaatggttatactagatatgcagatagtgtcaagggcagattcactataagtgcagacacatccaaaaacacagcctacctgcagatgaacagcctgagagctgaggacactgcagtctattattgttctagatggggagggtggggcttctatgcttttgacctgtggggtcaaggaaccctggtcacagtctcctctggtggtggtggatctggaggaggaggaagtggaggtggaggttctgatatccagatgacccagtccccaagctccctgtctgcctctgtgggggatagggtcaccatcacctgcagagccagtcaggatgtgaatactgctgtagcctggtatcaacagaaaccaggaaaagctcccaaactactgatttactctgcatccttcctctactctggagtcccttctagattctctggatccagatctggcactgacttcactctgaccatcagtagtctgcagcctgaagactttgcaacttattactgtcaacaacattatactactcctcccacctttggacagggtaccaaggtggagatcaaaggctctgatattgtactgacccagtcccctgactccctggctgtgtctctgggggaaagggcaaccatcaactgcaggagtagtcagacccttctgtactctaataaccagaaaaactacctggcctggtatcaaaaaaaaccaggacagcctcctaaactactgattagttgggcattcactaggaagtctggagtccctgacaggttctctggatctgggtctggaacagatttcacactgaccatcagcagtctgcaggctgaagatgttgcagtctactactgtcagcaatactcaaactacccttggacttttggacaggggaccaaagtggagatcaaaaggactgtcgctgcaccatctgtcttcatcttcccaccatctgatgagcagttgaaatctggaactgcctctgttaagtgcctgctgaataacttctatcccagagaggccaaagtacagtggaaggtggataatgccctccaaagtggtaactcccaggagagtgtcacagagcaggacagcaaggacagcacctacagcctcagcagcaccctgaccctgagcaaagcagactatgagaaacacaaagtctatgcctgtgaagtcacccatcagggcctgagcagcccagtcacaaagagcttcaacaggggagagtgttagtagtaactcgaggacggggtgaactacgcctgaggatccgatctttttccctctgccaaaaattatggggacatcatgaagccccttgagcatctgacttctggctaataaaggaaatttattttcattgcaatagtgtgttggaattttttgtgtctctcactcggcctaggtagataagtagcatggcgggttaatcattaactacaaggaacccctagtgatggagttggccactccctctctgcgcgctcgctcgctcactgaggccgggcgaccaaaggtcgcccgacgcccgggctttgcccgggcggcctcagtgagcgagcgagcgcgcag

SEQ ID NO: 6508 - DNA, 4739 bp, synthetic construct
  source 1..4739: mol_type = other DNA
ctgcgcgctcgctcgctcactgaggccgcccgggcaaagcccgggcgtcgggcgacctttggtcgcccggcctcagtgagcgagcgagcgcgcagagagggagtggccaactccatcactaggggttccttgtagttaatgattaacccgccatgctacttatctaccagggtaatggggatcctctagaactatagctagtcgacattgattattgactagttattaatagtaatcaattacggggtcattagttcatagcccatatatggagttccgcgttacataacttacggtaaatggcccgcctggctgaccgcccaacgacccccgcccattgacgtcaataatgacgtatgttcccatagtaacgccaatagggactttccattgacgtcaatgggtggagtatttacggtaaactgcccacttggcagtacatcaagtgtatcatatgccaagtacgccccctattgacgtcaatgacggtaaatggcccgcctggcattatgcccagtacatgaccttatgggactttcctacttggcagtacatctacgtattagtcatcgctattaccatgtcgaggccacgttctgcttcactctccccatctcccccccctccccacccccaattttgtatttatttattttttaattattttgtgcagcgatgggggcggggggggggggcgcgcgccaggcggggcggggcggggcgaggggcggggcggggcgaggcggagaggtgcggcggcagccaatcagagcggcgcgctccgaaagtttccttttatggcgaggcggcggcggcggcggccctataaaaagcgaagcgcgcggcgggcgggagcaagcttcgtttagtgaaccgtcagatcgcctggagacgccatccacgctgttttgacctccatagaagacaccgggaccgatccagcctccgcggattcgaatcccggccgggaacggtgcattggaacgcggattccccgtgccaagagtgacgtaagtaccgcctatagagtctataggcccacaaaaaatgctttcttcttttaatatacttttttgtttatcttatttctaatactttccctaatctctttctttcagggcaataatgatacaatgtatcatgcctctttgcaccattctaaagaataacagtgataatttctgggttaaggcaatagcaatatttctgcatataaatatttctgcatataaattgtaactgatgtaagaggtttcatattgctaatagcagctacaatccagctaccattctgcttttattttatggttgggataaggctggattattctgagtccaagctaggcccttttgctaatcatgttcatacctcttatcttcctcccacagctcctgggcaacgtgctggtctgtgtgctggcccatcactttggcaaagaattgggattcgaaccggtgccgccaccatggactggacctggaggttcctctttgtggtggcagcagctacaggtgtccagtcccaagttcagctggtgcagtctggtgcagaagttaagaagccaggggcatcagtaaaggtgtcctgcaaggcttctggctactctttcactgggtatttcataaattgggtgagagaggcccccggccagggcctggaatggatgggccatatttcctcctcttatgcaacttctacatataaccagaagtttcagggcagagtcactttcactgtggacacatccagctctacagcctacatggagctgtcaagcctgagatctgaggacactgcagtctattattgtgtgagaagtggaaactatgaagagtatgctatggactactggggtcaaggaaccctggtcacagtctcctcagcctctaccaagggcccatctgtcttccccctggcaccctcctccaagagcacctctgggggcacagctgccctgggctgcctggtcaaggactacttccctgaacctgtgacagtctcctggaactcaggagccctgaccagtggagtgcacaccttccctgctgtcctacagtcctcaggactctactccctcagctctgtggtgacagtgccctccagcagcttgggcacccagacctacatctgcaatgtgaatcacaagcccagcaacaccaaggtggacaagagagttgagcccaaatcttgtgacaaaactcacacatgcccaccttgcccagcacctgaactggtggggggaccatcagtcttcctcctccccccaaaacccaaggacaccctcatgatctccagaacccctgaggtcacatgtgtggtggtggatgtgagccatgaagaccctgaggtcaagttcaactggtatgtggatggagtggaggtgcataatgccaagacaaagccccctgaggagcagtacaacagcactctcagagtggtctctgtcctcacagtcctgcaccaggactggctgaatggcaaggagtacaagtgcaaggtctccaacaaagccctcccagcccccattgagaaaaccatctccaaagccaaagggcagcccagagaaccacaggtgtacaccctgcccccatccagagatgagctgaccaagaaccaggtcagcctgacctgcctggtcaaaggcttctatccctctgacattgctgtggagtgggagagcaatgggcagcctgagaacaactacaagaccacacctcttgtgctggactctgatggctccttcttcctctacagcaagctcacagtggacaagagcaggtggcagcaggggaatgtcttctcatgctctgtgatgcatgaggctctgcacaaccactacacccagaagagcctctccctgtctccaggtaaaagaaagaggagagagggcagaggaagtcttctaacatgtggtgatgtggaggagaatcctggccctatggacatgagggtccctgctcagctcctggggctcctgctgctctggctctcaggtgccagatgtgaggttcagctggtggagtctggtggtggcctggtgcagccagggggctcactcagattgtcctgtgcagcttctggcttcaacattaaagacacctatatacactgggtgagacaggcccctggaaagggcctggaatgggttgcaaggatttatcctactaatggttatactagatatgcagatagtgtcaagggcagattcactataagtgcagacacatccaaaaacacagcctacctgcagatgaacagcctgagagctgaggacactgcagtctattattgttctagatggggagggtggggcttctatgctatggccctgtggggtcaaggaaccctggtcacagtctcctctggtggtggtggatctggaggaggaggaagtggaggtggaggttctgatatccagatgacccagtccccaagctccctgtctgcctctgtgggggatagggtcaccatcacctgcagagccagtcaggatgtgaatactgctgtagcctggtatcaacagaaaccaggaaaagctcccaaactactgatttactctgcatccttcctctactctggagtcccttctagattctctggatccagatctggcactgacttcactctgaccatcagtagtctgcagcctgaagactttgcaacttattactgtcaacaacattatactactcctcccacctttggacagggtaccaaggtggagatcaaaggctctgatattgtactgacccagtcccctgactccctggctgtgtctctgggggaaagggcaaccatcaactgcaggagtagtcagacccttctgtactctaataaccagaaaaactacctggcctggtatcaaaaaaaaccaggacagcctcctaaactactgattagttgggcattcactaggaagtctggagtccctgacaggttctctggatctgggtctggaacagatttcacactgaccatcagcagtctgcaggctgaagatgttgcagtctactactgtcagcaatactcaaactacccttggacttttggacaggggaccaaagtggagatcaaaaggactgtcgctgcaccatctgtcttcatcttcccaccatctgatgagcagttgaaatctggaactgcctctgttaagtgcctgctgaataacttctatcccagagaggccaaagtacagtggaaggtggataatgccctccaaagtggtaactcccaggagagtgtcacagagcaggacagcaaggacagcacctacagcctcagcagcaccctgaccctgagcaaagcagactatgagaaacacaaagtctatgcctgtgaagtcacccatcagggcctgagcagcccagtcacaaagagcttcaacaggggagagtgttagtagtaactcgaggacggggtgaactacgcctgaggatccgatctttttccctctgccaaaaattatggggacatcatgaagccccttgagcatctgacttctggctaataaaggaaatttattttcattgcaatagtgtgttggaattttttgtgtctctcactcggcctaggtagataagtagcatggcgggttaatcattaactacaaggaacccctagtgatggagttggccactccctctctgcgcgctcgctcgctcactgaggccgggcgaccaaaggtcgcccgacgcccgggctttgcccgggcggcctcagtgagcgagcgagcgcgcag

SEQ ID NO: 6509 - DNA, 4739 bp, synthetic construct
  source 1..4739: mol_type = other DNA
ctgcgcgctcgctcgctcactgaggccgcccgggcaaagcccgggcgtcgggcgacctttggtcgcccggcctcagtgagcgagcgagcgcgcagagagggagtggccaactccatcactaggggttccttgtagttaatgattaacccgccatgctacttatctaccagggtaatggggatcctctagaactatagctagtcgacattgattattgactagttattaatagtaatcaattacggggtcattagttcatagcccatatatggagttccgcgttacataacttacggtaaatggcccgcctggctgaccgcccaacgacccccgcccattgacgtcaataatgacgtatgttcccatagtaacgccaatagggactttccattgacgtcaatgggtggagtatttacggtaaactgcccacttggcagtacatcaagtgtatcatatgccaagtacgccccctattgacgtcaatgacggtaaatggcccgcctggcattatgcccagtacatgaccttatgggactttcctacttggcagtacatctacgtattagtcatcgctattaccatgtcgaggccacgttctgcttcactctccccatctcccccccctccccacccccaattttgtatttatttattttttaattattttgtgcagcgatgggggcggggggggggggcgcgcgccaggcggggcggggcggggcgaggggcggggcggggcgaggcggagaggtgcggcggcagccaatcagagcggcgcgctccgaaagtttccttttatggcgaggcggcggcggcggcggccctataaaaagcgaagcgcgcggcgggcgggagcaagcttcgtttagtgaaccgtcagatcgcctggagacgccatccacgctgttttgacctccatagaagacaccgggaccgatccagcctccgcggattcgaatcccggccgggaacggtgcattggaacgcggattccccgtgccaagagtgacgtaagtaccgcctatagagtctataggcccacaaaaaatgctttcttcttttaatatacttttttgtttatcttatttctaatactttccctaatctctttctttcagggcaataatgatacaatgtatcatgcctctttgcaccattctaaagaataacagtgataatttctgggttaaggcaatagcaatatttctgcatataaatatttctgcatataaattgtaactgatgtaagaggtttcatattgctaatagcagctacaatccagctaccattctgcttttattttatggttgggataaggctggattattctgagtccaagctaggcccttttgctaatcatgttcatacctcttatcttcctcccacagctcctgggcaacgtgctggtctgtgtgctggcccatcactttggcaaagaattgggattcgaaccggtgccgccaccatggactggacctggaggttcctctttgtggtggcagcagctacaggtgtccagtcccaagttcagctggtgcagtctggtgcagaagttaagaagccaggggcatcagtaaaggtgtcctgcaaggcttctggctactctttcactgggtatttcataaattgggtgagagaggcccccggccagggcctggaatggatgggccatatttcctcctcttatgcaacttctacatataaccagaagtttcagggcagagtcactttcactgtggacacatccagctctacagcctacatggagctgtcaagcctgagatctgaggacactgcagtctattattgtgtgagaagtggaaactatgaagagtatgctatggactactggggtcaaggaaccctggtcacagtctcctcagcctctaccaagggcccatctgtcttccccctggcaccctcctccaagagcacctctgggggcacagctgccctgggctgcctggtcaaggactacttccctgaacctgtgacagtctcctggaactcaggagccctgaccagtggagtgcacaccttccctgctgtcctacagtcctcaggactctactccctcagctctgtggtgacagtgccctccagcagcttgggcacccagacctacatctgcaatgtgaatcacaagcccagcaacaccaaggtggacaagagagttgagcccaaatcttgtgacaaaactcacacatgcccaccttgcccagcacctgaactggtggggggaccatcagtcttcctcctccccccaaaacccaaggacaccctcatgatctccagaacccctgaggtcacatgtgtggtggtggatgtgagccatgaagaccctgaggtcaagttcaactggtatgtggatggagtggaggtgcataatgccaagacaaagccccctgaggagcagtacaacagcactctcagagtggtctctgtcctcacagtcctgcaccaggactggctgaatggcaaggagtacaagtgcaaggtctccaacaaagccctcccagcccccattgagaaaaccatctccaaagccaaagggcagcccagagaaccacaggtgtacaccctgcccccatccagagatgagctgaccaagaaccaggtcagcctgacctgcctggtcaaaggcttctatccctctgacattgctgtggagtgggagagcaatgggcagcctgagaacaactacaagaccacacctcttgtgctggactctgatggctccttcttcctctacagcaagctcacagtggacaagagcaggtggcagcaggggaatgtcttctcatgctctgtgatgcatgaggctctgcacaaccactacacccagaagagcctctccctgtctccaggtaaaagaaagaggagagagggcagaggaagtcttctaacatgtggtgatgtggaggagaatcctggccctatggacatgagggtccctgctcagctcctggggctcctgctgctctggctctcaggtgccagatgtgaggttcagctggtggagtctggtggtggcctggtgcagccagggggctcactcagattgtcctgtgcagcttctggcttcaacattaaagacacctatatacactgggtgagacaggcccctggaaagggcctggaatgggttgcaaggatttatcctactaatggttatactagatatgcagatagtgtcaagggcagattcactataagtgcagacacatccaaaaacacagcctacctgcagatgaacagcctgagagctgaggacactgcagtctattattgttctagatggggaggggatggcttctatgcttttgccctgtggggtcaaggaaccctggtcacagtctcctctggtggtggtggatctggaggaggaggaagtggaggtggaggttctgatatccagatgacccagtccccaagctccctgtctgcctctgtgggggatagggtcaccatcacctgcagagccagtcaggatgtgaatactgctgtagcctggtatcaacagaaaccaggaaaagctcccaaactactgatttactctgcatccttcctctactctggagtcccttctagattctctggatccagatctggcactgacttcactctgaccatcagtagtctgcagcctgaagactttgcaacttattactgtcaacaacattatactactcctcccacctttggacagggtaccaaggtggagatcaaaggctctgatattgtactgacccagtcccctgactccctggctgtgtctctgggggaaagggcaaccatcaactgcaggagtagtcagacccttctgtactctaataaccagaaaaactacctggcctggtatcaaaaaaaaccaggacagcctcctaaactactgattagttgggcattcactaggaagtctggagtccctgacaggttctctggatctgggtctggaacagatttcacactgaccatcagcagtctgcaggctgaagatgttgcagtctactactgtcagcaatactcaaactacccttggacttttggacaggggaccaaagtggagatcaaaaggactgtcgctgcaccatctgtcttcatcttcccaccatctgatgagcagttgaaatctggaactgcctctgttaagtgcctgctgaataacttctatcccagagaggccaaagtacagtggaaggtggataatgccctccaaagtggtaactcccaggagagtgtcacagagcaggacagcaaggacagcacctacagcctcagcagcaccctgaccctgagcaaagcagactatgagaaacacaaagtctatgcctgtgaagtcacccatcagggcctgagcagcccagtcacaaagagcttcaacaggggagagtgttagtagtaactcgaggacggggtgaactacgcctgaggatccgatctttttccctctgccaaaaattatggggacatcatgaagccccttgagcatctgacttctggctaataaaggaaatttattttcattgcaatagtgtgttggaattttttgtgtctctcactcggcctaggtagataagtagcatggcgggttaatcattaactacaaggaacccctagtgatggagttggccactccctctctgcgcgctcgctcgctcactgaggccgggcgaccaaaggtcgcccgacgcccgggctttgcccgggcggcctcagtgagcgagcgagcgcgcag

SEQ ID NO: 6510 - protein, 11 aa, synthetic construct
WGGWGFYAFAL

SEQ ID NO: 6511 - protein, 120 aa, synthetic construct; identical to SEQ ID NO: 5367

SEQ ID NO: 6512 - DNA, 360 bp, synthetic construct
  source 1..360: mol_type = other DNA
gaggttcagctggtggagtctggaggtggcctggtgcagccagggggctcactcagattgtcctgtgcagcttctggcttcaacattaaagacacctatatacactgggtgagacaggccccaggtaagggcctggaatgggttgcaaggatttatcctaccaatggttatactagatatgctgattctgtcaagggcagattcactatatctgcagacacatccaaaaacacagcctacctgcagatgaacagcctgagagctgaggacactgctgtctattattgttctagatggggagggtggggcttctatgcttttgccctgtggggtcaaggaaccctggtcacagtctcctct

SEQ ID NO: 6513 - protein, 450 aa, synthetic construct
EVQLVESGGGLVQPGGSLRLSCAASGFNIKDTYIHWVRQAPGKGLEWVARIYPTNGYTRYADSVKGRFTISADTSKNTAYLQMNSLRAEDTAVYYCSRWGGWGFYAFALWGQGTLVTVSSASTKGPSVFPLAPSSKSTSGGTAALGCLVKDYFPEPVTVSWNSGALTSGVHTFPAVLQSSGLYSLSSVVTVPSSSLGTQTYICNVNHKPSNTKVDKRVEPKSCDKTHTCPPCPAPELVGGPSVFLLPPKPKDTLMISRTPEVTCVVVDVSHEDPEVKFNWYVDGVEVHNAKTKPPEEQYNSTLRVVSVLTVLHQDWLNGKEYKCKVSNKALPAPIEKTISKAKGQPREPQVYTLPPSRDELTKNQVSLTCLVKGFYPSDIAVEWESNGQPENNYKTTPLVLDSDGSFFLYSKLTVDKSRWQQGNVFSCSVMHEALHNHYTQKSLSLSPGK

SEQ ID NO: 6514 - DNA, 1350 bp, synthetic construct
  source 1..1350: mol_type = other DNA
gaggttcagctggtggagtctggaggtggcctggtgcagccagggggctcactcagattgtcctgtgcagcttctggcttcaacattaaagacacctatatacactgggtgagacaggccccaggtaagggcctggaatgggttgcaaggatttatcctaccaatggttatactagatatgctgattctgtcaagggcagattcactatatctgcagacacatccaaaaacacagcctacctgcagatgaacagcctgagagctgaggacactgctgtctattattgttctagatggggagggtggggcttctatgcttttgccctgtggggtcaaggaaccctggtcacagtctcctctgcctctaccaagggcccatctgtcttccccctggcaccctcctccaagagcacctctgggggcacagctgccctgggctgcctggtcaaggactacttccctgaacctgtgacagtctcctggaactcaggagccctgaccagtggagtgcacaccttccctgctgtcctacagtcctcaggactctactccctcagctctgtggtgacagtgccctccagcagcttgggcacccagacctacatctgcaatgtgaatcacaagcccagcaacaccaaggtggacaagagagttgagcccaaatcttgtgacaaaactcacacatgcccaccttgcccagcacctgaactggtggggggaccatcagtcttcctcctccccccaaaacccaaggacaccctcatgatctccagaacccctgaggtcacatgtgtggtggtggatgtgagccatgaagaccctgaggtcaagttcaactggtatgtggatggagtggaggtgcataatgccaagacaaagccccctgaggagcagtacaacagcactctcagagtggtctctgtcctcacagtcctgcaccaggactggctgaatggcaaggagtacaagtgcaaggtctccaacaaagccctcccagcccccattgagaaaaccatctccaaagccaaagggcagcccagagaaccacaggtgtacaccctgcccccatccagagatgagctgaccaagaaccaggtcagcctgacctgcctggtcaaaggcttctatccctctgacattgctgtggagtgggagagcaatgggcagcctgagaacaactacaagaccacacctcttgtgctggactctgatggctccttcttcctctacagcaagctcacagtggacaagagcaggtggcagcaggggaatgtcttctcatgctctgtgatgcatgaggctctgcacaaccactacacccagaagagcctctccctgtctccaggtaaa

SEQ ID NO: 6515 - protein, 11 aa, synthetic construct
WGGWGFYAFAY

SEQ ID NO: 6516 - protein, 120 aa, synthetic construct
EVQLVESGGGLVQPGGSLRLSCAASGFNIKDTYIHWVRQAPGKGLEWVARIYPTNGYTRYADSVKGRFTISADTSKNTAYLQMNSLRAEDTAVYYCSRWGGWGFYAFAYWGQGTLVTVSS

SEQ ID NO: 6517 - DNA, 360 bp, synthetic construct
  source 1..360: mol_type = other DNA
gaggttcagctggtggagtctggaggtggcctggtgcagccagggggctcactcagattgtcctgtgcagcttctggcttcaacattaaagacacctatatacactgggtgagacaggccccaggtaagggcctggaatgggttgcaaggatttatcctaccaatggttatactagatatgctgattctgtcaagggcagattcactatatctgcagacacatccaaaaacacagcctacctgcagatgaacagcctgagagctgaggacactgctgtctattattgttctagatggggagggtggggcttctatgcttttgcctactggggtcaaggaaccctggtcacagtctcctct

SEQ ID NO: 6518 - protein, 450 aa, synthetic construct
EVQLVESGGGLVQPGGSLRLSCAASGFNIKDTYIHWVRQAPGKGLEWVARIYPTNGYTRYADSVKGRFTISADTSKNTAYLQMNSLRAEDTAVYYCSRWGGWGFYAFAYWGQGTLVTVSSASTKGPSVFPLAPSSKSTSGGTAALGCLVKDYFPEPVTVSWNSGALTSGVHTFPAVLQSSGLYSLSSVVTVPSSSLGTQTYICNVNHKPSNTKVDKRVEPKSCDKTHTCPPCPAPELVGGPSVFLLPPKPKDTLMISRTPEVTCVVVDVSHEDPEVKFNWYVDGVEVHNAKTKPPEEQYNSTLRVVSVLTVLHQDWLNGKEYKCKVSNKALPAPIEKTISKAKGQPREPQVYTLPPSRDELTKNQVSLTCLVKGFYPSDIAVEWESNGQPENNYKTTPLVLDSDGSFFLYSKLTVDKSRWQQGNVFSCSVMHEALHNHYTQKSLSLSPGK

SEQ ID NO: 6519 - DNA, 1350 bp, synthetic construct
  source 1..1350: mol_type = other DNA
gaggttcagctggtggagtctggaggtggcctggtgcagccagggggctcactcagattgtcctgtgcagcttctggcttcaacattaaagacacctatatacactgggtgagacaggccccaggtaagggcctggaatgggttgcaaggatttatcctaccaatggttatactagatatgctgattctgtcaagggcagattcactatatctgcagacacatccaaaaacacagcctacctgcagatgaacagcctgagagctgaggacactgctgtctattattgttctagatggggagggtggggcttctatgcttttgcctactggggtcaaggaaccctggtcacagtctcctctgcctctaccaagggcccatctgtcttccccctggcaccctcctccaagagcacctctgggggcacagctgccctgggctgcctggtcaaggactacttccctgaacctgtgacagtctcctggaactcaggagccctgaccagtggagtgcacaccttccctgctgtcctacagtcctcaggactctactccctcagctctgtggtgacagtgccctccagcagcttgggcacccagacctacatctgcaatgtgaatcacaagcccagcaacaccaaggtggacaagagagttgagcccaaatcttgtgacaaaactcacacatgcccaccttgcccagcacctgaactggtggggggaccatcagtcttcctcctccccccaaaacccaaggacaccctcatgatctccagaacccctgaggtcacatgtgtggtggtggatgtgagccatgaagaccctgaggtcaagttcaactggtatgtggatggagtggaggtgcataatgccaagacaaagccccctgaggagcagtacaacagcactctcagagtggtctctgtcctcacagtcctgcaccaggactggctgaatggcaaggagtacaagtgcaaggtctccaacaaagccctcccagcccccattgagaaaaccatctccaaagccaaagggcagcccagagaaccacaggtgtacaccctgcccccatccagagatgagctgaccaagaaccaggtcagcctgacctgcctggtcaaaggcttctatccctctgacattgctgtggagtgggagagcaatgggcagcctgagaacaactacaagaccacacctcttgtgctggactctgatggctccttcttcctctacagcaagctcacagtggacaagagcaggtggcagcaggggaatgtcttctcatgctctgtgatgcatgaggctctgcacaaccactacacccagaagagcctctccctgtctccaggtaaa

SEQ ID NO: 6520 - protein, 11 aa, synthetic construct
WGGWGFYAFDL

SEQ ID NO: 6521 - protein, 120 aa, synthetic construct
EVQLVESGGGLVQPGGSLRLSCAASGFNIKDTYIHWVRQAPGKGLEWVARIYPTNGYTRYADSVKGRFTISADTSKNTAYLQMNSLRAEDTAVYYCSRWGGWGFYAFDLWGQGTLVTVSS

SEQ ID NO: 6522 - DNA, 360 bp, synthetic construct
  source 1..360: mol_type = other DNA
gaggttcagctggtggagtctggaggtggcctggtgcagccagggggctcactcagattgtcctgtgcagcttctggcttcaacattaaagacacctatatacactgggtgagacaggccccaggtaagggcctggaatgggttgcaaggatttatcctaccaatggttatactagatatgctgattctgtcaagggcagattcactatatctgcagacacatccaaaaacacagcctacctgcagatgaacagcctgagagctgaggacactgctgtctattattgttctagatggggagggtggggcttctatgcttttgacctgtggggtcaaggaaccctggtcacagtctcctct

SEQ ID NO: 6523 - protein, 450 aa, synthetic construct
EVQLVESGGGLVQPGGSLRLSCAASGFNIKDTYIHWVRQAPGKGLEWVARIYPTNGYTRYADSVKGRFTISADTSKNTAYLQMNSLRAEDTAVYYCSRWGGWGFYAFDLWGQGTLVTVSSASTKGPSVFPLAPSSKSTSGGTAALGCLVKDYFPEPVTVSWNSGALTSGVHTFPAVLQSSGLYSLSSVVTVPSSSLGTQTYICNVNHKPSNTKVDKRVEPKSCDKTHTCPPCPAPELVGGPSVFLLPPKPKDTLMISRTPEVTCVVVDVSHEDPEVKFNWYVDGVEVHNAKTKPPEEQYNSTLRVVSVLTVLHQDWLNGKEYKCKVSNKALPAPIEKTISKAKGQPREPQVYTLPPSRDELTKNQVSLTCLVKGFYPSDIAVEWESNGQPENNYKTTPLVLDSDGSFFLYSKLTVDKSRWQQGNVFSCSVMHEALHNHYTQKSLSLSPGK

SEQ ID NO: 6524 - DNA, 1350 bp, synthetic construct
  source 1..1350: mol_type = other DNA
gaggttcagctggtggagtctggaggtggcctggtgcagccagggggctcactcagattgtcctgtgcagcttctggcttcaacattaaagacacctatatacactgggtgagacaggccccaggtaagggcctggaatgggttgcaaggatttatcctaccaatggttatactagatatgctgattctgtcaagggcagattcactatatctgcagacacatccaaaaacacagcctacctgcagatgaacagcctgagagctgaggacactgctgtctattattgttctagatggggagggtggggcttctatgcttttgacctgtggggtcaaggaaccctggtcacagtctcctctgcctctaccaagggcccatctgtcttccccctggcaccctcctccaagagcacctctgggggcacagctgccctgggctgcctggtcaaggactacttccctgaacctgtgacagtctcctggaactcaggagccctgaccagtggagtgcacaccttccctgctgtcctacagtcctcaggactctactccctcagctctgtggtgacagtgccctccagcagcttgggcacccagacctacatctgcaatgtgaatcacaagcccagcaacaccaaggtggacaagagagttgagcccaaatcttgtgacaaaactcacacatgcccaccttgcccagcacctgaactggtggggggaccatcagtcttcctcctccccccaaaacccaaggacaccctcatgatctccagaacccctgaggtcacatgtgtggtggtggatgtgagccatgaagaccctgaggtcaagttcaactggtatgtggatggagtggaggtgcataatgccaagacaaagccccctgaggagcagtacaacagcactctcagagtggtctctgtcctcacagtcctgcaccaggactggctgaatggcaaggagtacaagtgcaaggtctccaacaaagccctcccagcccccattgagaaaaccatctccaaagccaaagggcagcccagagaaccacaggtgtacaccctgcccccatccagagatgagctgaccaagaaccaggtcagcctgacctgcctggtcaaaggcttctatccctctgacattgctgtggagtgggagagcaatgggcagcctgagaacaactacaagaccacacctcttgtgctggactctgatggctccttcttcctctacagcaagctcacagtggacaagagcaggtggcagcaggggaatgtcttctcatgctctgtgatgcatgaggctctgcacaaccactacacccagaagagcctctccctgtctccaggtaaa

SEQ ID NO: 6525 - protein, 11 aa, synthetic construct
WGGWGFYAMAL

SEQ ID NO: 6526 - protein, 120 aa, synthetic construct
EVQLVESGGGLVQPGGSLRLSCAASGFNIKDTYIHWVRQAPGKGLEWVARIYPTNGYTRYADSVKGRFTISADTSKNTAYLQMNSLRAEDTAVYYCSRWGGWGFYAMALWGQGTLVTVSS

SEQ ID NO: 6527 - DNA, 360 bp, synthetic construct
  source 1..360: mol_type = other DNA
gaggttcagctggtggagtctggaggtggcctggtgcagccagggggctcactcagattgtcctgtgcagcttctggcttcaacattaaagacacctatatacactgggtgagacaggccccaggtaagggcctggaatgggttgcaaggatttatcctaccaatggttatactagatatgctgattctgtcaagggcagattcactatatctgcagacacatccaaaaacacagcctacctgcagatgaacagcctgagagctgaggacactgctgtctattattgttctagatggggagggtggggcttctatgctatggccctgtggggtcaaggaaccctggtcacagtctcctct

SEQ ID NO: 6528 - protein, 450 aa, synthetic construct
EVQLVESGGGLVQPGGSLRLSCAASGFNIKDTYIHWVRQAPGKGLEWVARIYPTNGYTRYADSVKGRFTISADTSKNTAYLQMNSLRAEDTAVYYCSRWGGWGFYAMALWGQGTLVTVSSASTKGPSVFPLAPSSKSTSGGTAALGCLVKDYFPEPVTVSWNSGALTSGVHTFPAVLQSSGLYSLSSVVTVPSSSLGTQTYICNVNHKPSNTKVDKRVEPKSCDKTHTCPPCPAPELVGGPSVFLLPPKPKDTLMISRTPEVTCVVVDVSHEDPEVKFNWYVDGVEVHNAKTKPPEEQYNSTLRVVSVLTVLHQDWLNGKEYKCKVSNKALPAPIEKTISKAKGQPREPQVYTLPPSRDELTKNQVSLTCLVKGFYPSDIAVEWESNGQPENNYKTTPLVLDSDGSFFLYSKLTVDKSRWQQGNVFSCSVMHEALHNHYTQKSLSLSPGK

SEQ ID NO: 6529 - DNA, 1350 bp, synthetic construct
  source 1..1350: mol_type = other DNA
gaggttcagctggtggagtctggaggtggcctggtgcagccagggggctcactcagattgtcctgtgcagcttctggcttcaacattaaagacacctatatacactgggtgagacaggccccaggtaagggcctggaatgggttgcaaggatttatcctaccaatggttatactagatatgctgattctgtcaagggcagattcactatatctgcagacacatccaaaaacacagcctacctgcagatgaacagcctgagagctgaggacactgctgtctattattgttctagatggggagggtggggcttctatgctatggccctgtggggtcaaggaaccctggtcacagtctcctctgcctctaccaagggcccatctgtcttccccctggcaccctcctccaagagcacctctgggggcacagctgccctgggctgcctggtcaaggactacttccctgaacctgtgacagtctcctggaactcaggagccctgaccagtggagtgcacaccttccctgctgtcctacagtcctcaggactctactccctcagctctgtggtgacagtgccctccagcagcttgggcacccagacctacatctgcaatgtgaatcacaagcccagcaacaccaaggtggacaagagagttgagcccaaatcttgtgacaaaactcacacatgcccaccttgcccagcacctgaactggtggggggaccatcagtcttcctcctccccccaaaacccaaggacaccctcatgatctccagaacccctgaggtcacatgtgtggtggtggatgtgagccatgaagaccctgaggtcaagttcaactggtatgtggatggagtggaggtgcataatgccaagacaaagccccctgaggagcagtacaacagcactctcagagtggtctctgtcctcacagtcctgcaccaggactggctgaatggcaaggagtacaagtgcaaggtctccaacaaagccctcccagcccccattgagaaaaccatctccaaagccaaagggcagcccagagaaccacaggtgtacaccctgcccccatccagagatgagctgaccaagaaccaggtcagcctgacctgcctggtcaaaggcttctatccctctgacattgctgtggagtgggagagcaatgggcagcctgagaacaactacaagaccacacctcttgtgctggactctgatggctccttcttcctctacagcaagctcacagtggacaagagcaggtggcagcaggggaatgtcttctcatgctctgtgatgcatgaggctctgcacaaccactacacccagaagagcctctccctgtctccaggtaaa

SEQ ID NO: 6530 - protein, 11 aa, synthetic construct
WGGDGFYAFAL

SEQ ID NO: 6531 - protein, 120 aa, synthetic construct
EVQLVESGGGLVQPGGSLRLSCAASGFNIKDTYIHWVRQAPGKGLEWVARIYPTNGYTRYADSVKGRFTISADTSKNTAYLQMNSLRAEDTAVYYCSRWGGDGFYAFALWGQGTLVTVSS

SEQ ID NO: 6532 - DNA, 360 bp, synthetic construct
  source 1..360: mol_type = other DNA
gaggttcagctggtggagtctggaggtggcctggtgcagccagggggctcactcagattgtcctgtgcagcttctggcttcaacattaaagacacctatatacactgggtgagacaggccccaggtaagggcctggaatgggttgcaaggatttatcctaccaatggttatactagatatgctgattctgtcaagggcagattcactatatctgcagacacatccaaaaacacagcctacctgcagatgaacagcctgagagctgaggacactgctgtctattattgttctagatggggaggggatggcttctatgcttttgccctgtggggtcaaggaaccctggtcacagtctcctct

SEQ ID NO: 6533 - protein, 450 aa, synthetic construct
EVQLVESGGGLVQPGGSLRLSCAASGFNIKDTYIHWVRQAPGKGLEWVARIYPTNGYTRYADSVKGRFTISADTSKNTAYLQMNSLRAEDTAVYYCSRWGGDGFYAFALWGQGTLVTVSSASTKGPSVFPLAPSSKSTSGGTAALGCLVKDYFPEPVTVSWNSGALTSGVHTFPAVLQSSGLYSLSSVVTVPSSSLGTQTYICNVNHKPSNTKVDKRVEPKSCDKTHTCPPCPAPELVGGPSVFLLPPKPKDTLMISRTPEVTCVVVDVSHEDPEVKFNWYVDGVEVHNAKTKPPEEQYNSTLRVVSVLTVLHQDWLNGKEYKCKVSNKALPAPIEKTISKAKGQPREPQVYTLPPSRDELTKNQVSLTCLVKGFYPSDIAVEWESNGQPENNYKTTPLVLDSDGSFFLYSKLTVDKSRWQQGNVFSCSVMHEALHNHYTQKSLSLSPGK

SEQ ID NO: 6534 - DNA, 1350 bp, synthetic construct
  source 1..1350: mol_type = other DNA
gaggttcagctggtggagtctggaggtggcctggtgcagccagggggctcactcagattgtcctgtgcagcttctggcttcaacattaaagacacctatatacactgggtgagacaggccccaggtaagggcctggaatgggttgcaaggatttatcctaccaatggttatactagatatgctgattctgtcaagggcagattcactatatctgcagacacatccaaaaacacagcctacctgcagatgaacagcctgagagctgaggacactgctgtctattattgttctagatggggaggggatggcttctatgcttttgccctgtggggtcaaggaaccctggtcacagtctcctctgcctctaccaagggcccatctgtcttccccctggcaccctcctccaagagcacctctgggggcacagctgccctgggctgcctggtcaaggactacttccctgaacctgtgacagtctcctggaactcaggagccctgaccagtggagtgcacaccttccctgctgtcctacagtcctcaggactctactccctcagctctgtggtgacagtgccctccagcagcttgggcacccagacctacatctgcaatgtgaatcacaagcccagcaacaccaaggtggacaagagagttgagcccaaatcttgtgacaaaactcacacatgcccaccttgcccagcacctgaactggtggggggaccatcagtcttcctcctccccccaaaacccaaggacaccctcatgatctccagaacccctgaggtcacatgtgtggtggtggatgtgagccatgaagaccctgaggtcaagttcaactggtatgtggatggagtggaggtgcataatgccaagacaaagccccctgaggagcagtacaacagcactctcagagtggtctctgtcctcacagtcctgcaccaggactggctgaatggcaaggagtacaagtgcaaggtctccaacaaagccctcccagcccccattgagaaaaccatctccaaagccaaagggcagcccagagaaccacaggtgtacaccctgcccccatccagagatgagctgaccaagaaccaggtcagcctgacctgcctggtcaaaggcttctatccctctgacattgctgtggagtgggagagcaatgggcagcctgagaacaactacaagaccacacctcttgtgctggactctgatggctccttcttcctctacagcaagctcacagtggacaagagcaggtggcagcaggggaatgtcttctcatgctctgtgatgcatgaggctctgcacaaccactacacccagaagagcctctccctgtctccaggtaaa

SEQ ID NO: 6535 - protein, 11 aa, synthetic construct
WGGWGFYAFAL

SEQ ID NO: 6536 - protein, 120 aa, synthetic construct; identical to SEQ ID NO: 5367

SEQ ID NO: 6537 - DNA, 360 bp, synthetic construct
  source 1..360: mol_type = other DNA
gaggttcagctggtggagtctggtggtggcctggtgcagccagggggctcactcagattgtcctgtgcagcttctggcttcaacattaaagacacctatatacactgggtgagacaggcccctggaaagggcctggaatgggttgcaaggatttatcctactaatggttatactagatatgcagatagtgtcaagggcagattcactataagtgcagacacatccaaaaacacagcctacctgcagatgaacagcctgagagctgaggacactgcagtctattattgttctagatggggagggtggggcttctatgcttttgccctgtggggtcaaggaaccctggtcacagtctcctct

SEQ ID NO: 6538 - protein, 11 aa, synthetic construct
WGGWGFYAFAY

SEQ ID NO: 6539 - protein, 120 aa, synthetic construct; identical to SEQ ID NO: 6516

SEQ ID NO: 6540 - DNA, 360 bp, synthetic construct
  source 1..360: mol_type = other DNA
gaggttcagctggtggagtctggtggtggcctggtgcagccagggggctcactcagattgtcctgtgcagcttctggcttcaacattaaagacacctatatacactgggtgagacaggcccctggaaagggcctggaatgggttgcaaggatttatcctactaatggttatactagatatgcagatagtgtcaagggcagattcactataagtgcagacacatccaaaaacacagcctacctgcagatgaacagcctgagagctgaggacactgcagtctattattgttctagatggggagggtggggcttctatgcttttgcctactggggtcaaggaaccctggtcacagtctcctct

SEQ ID NO: 6541 - protein, 11 aa, synthetic construct
WGGWGFYAFDL

SEQ ID NO: 6542 - protein, 120 aa, synthetic construct; identical to SEQ ID NO: 6521

SEQ ID NO: 6543 - DNA, 360 bp, synthetic construct
  source 1..360: mol_type = other DNA
gaggttcagctggtggagtctggtggtggcctggtgcagccagggggctcactcagattgtcctgtgcagcttctggcttcaacattaaagacacctatatacactgggtgagacaggcccctggaaagggcctggaatgggttgcaaggatttatcctactaatggttatactagatatgcagatagtgtcaagggcagattcactataagtgcagacacatccaaaaacacagcctacctgcagatgaacagcctgagagctgaggacactgcagtctattattgttctagatggggagggtggggcttctatgcttttgacctgtggggtcaaggaaccctggtcacagtctcctct

SEQ ID NO: 6544 - protein, 11 aa, synthetic construct
WGGWGFYAMAL

SEQ ID NO: 6545 - protein, 120 aa, synthetic construct; identical to SEQ ID NO: 6526

SEQ ID NO: 6546 - DNA, 360 bp, synthetic construct
  source 1..360: mol_type = other DNA
gaggttcagctggtggagtctggtggtggcctggtgcagccagggggctcactcagattgtcctgtgcagcttctggcttcaacattaaagacacctatatacactgggtgagacaggcccctggaaagggcctggaatgggttgcaaggatttatcctactaatggttatactagatatgcagatagtgtcaagggcagattcactataagtgcagacacatccaaaaacacagcctacctgcagatgaacagcctgagagctgaggacactgcagtctattattgttctagatggggagggtggggcttctatgctatggccctgtggggtcaaggaaccctggtcacagtctcctct

SEQ ID NO: 6547 - protein, 11 aa, synthetic construct
WGGDGFYAFAL

SEQ ID NO: 6548 - protein, 120 aa, synthetic construct; identical to SEQ ID NO: 6531

SEQ ID NO: 6549 - DNA, 360 bp, synthetic construct
  source 1..360: mol_type = other DNA
gaggttcagctggtggagtctggtggtggcctggtgcagccagggggctcactcagattgtcctgtgcagcttctggcttcaacattaaagacacctatatacactgggtgagacaggcccctggaaagggcctggaatgggttgcaaggatttatcctactaatggttatactagatatgcagatagtgtcaagggcagattcactataagtgcagacacatccaaaaacacagcctacctgcagatgaacagcctgagagctgaggacactgcagtctattattgttctagatggggaggggatggcttctatgcttttgccctgtggggtcaaggaaccctggtcacagtctcctct

SEQ ID NO: 6550 - DNA, 3989 bp, synthetic construct
  source 1..3989: mol_type = other DNA
ctgcgcgctcgctcgctcactgaggccgcccgggcaaagcccgggcgtcgggcgacctttggtcgcccggcctcagtgagcgagcgagcgcgcagagagggagtggccaactccatcactaggggttccttgtagttaatgattaacccgccatgctacttatctaccagggtaatggggatcctctagaactatagctagtcgacattgattattgactagttattaatagtaatcaattacggggtcattagttcatagcccatatatggagttccgcgttacataacttacggtaaatggcccgcctggctgaccgcccaacgacccccgcccattgacgtcaataatgacgtatgttcccatagtaacgccaatagggactttccattgacgtcaatgggtggagtatttacggtaaactgcccacttggcagtacatcaagtgtatcatatgccaagtacgccccctattgacgtcaatgacggtaaatggcccgcctggcattatgcccagtacatgaccttatgggactttcctacttggcagtacatctacgtattagtcatcgctattaccatgtcgaggccacgttctgcttcactctccccatctcccccccctccccacccccaattttgtatttatttattttttaattattttgtgcagcgatgggggcggggggggggggcgcgcgccaggcggggcggggcggggcgaggggcggggcggggcgaggcggagaggtgcggcggcagccaatcagagcggcgcgctccgaaagtttccttttatggcgaggcggcggcggcggcggccctataaaaagcgaagcgcgcggcgggcgggagcaagcttcgtttagtgaaccgtcagatcgcctggagacgccatccacgctgttttgacctccatagaagacaccgggaccgatccagcctccgcggattcgaatcccggccgggaacggtgcattggaacgcggattccccgtgccaagagtgacgtaagtaccgcctatagagtctataggcccacaaaaaatgctttcttcttttaatatacttttttgtttatcttatttctaatactttccctaatctctttctttcagggcaataatgatacaatgtatcatgcctctttgcaccattctaaagaataacagtgataatttctgggttaaggcaatagcaatatttctgcatataaatatttctgcatataaattgtaactgatgtaagaggtttcatattgctaatagcagctacaatccagctaccattctgcttttattttatggttgggataaggctggattattctgagtccaagctaggcccttttgctaatcatgttcatacctcttatcttcctcccacagctcctgggcaacgtgctggtctgtgtgctggcccatcactttggcaaagaattgggattcgaaccggtgccgccaccatggactggacctggaggttcctctttgtggtggcagcagctacaggtgtccagtctgaggttcagctggtggagtctggaggtggcctggtgcagccagggggctcactcagattgtcctgtgcagcttctggcttcaacattaaagacacctatatacactgggtgagacaggccccaggtaagggcctggaatgggttgcaaggatttatcctaccaatggttatactagatatgctgattctgtcaagggcagattcactatatctgcagacacatccaaaaacacagcctacctgcagatgaacagcctgagagctgaggacactgctgtctattattgttctagatggggaggggatggcttctatgctatggactactggggtcaaggaaccctggtcacagtctcctctgcctctaccaagggcccatctgtcttccccctggcaccctcctccaagagcacctctgggggcacagctgccctgggctgcctggtcaaggactacttccctgaacctgtgacagtctcctggaactcaggagccctgaccagtggagtgcacaccttccctgctgtcctacagtcctcaggactctactccctcagctctgtggtgacagtgccctccagcagcttgggcacccagacctacatctgcaatgtgaatcacaagcccagcaacaccaaggtggacaagagagttgagcccaaatcttgtgacaaaactcacacatgcccaccttgcccagcacctgaactggtggggggaccatcagtcttcctcctccccccaaaacccaaggacaccctcatgatctccagaacccctgaggtcacatgtgtggtggtggatgtgagccatgaagaccctgaggtcaagttcaactggtatgtggatggagtggaggtgcataatgccaagacaaagccccctgaggagcagtacaacagcactctcagagtggtctctgtcctcacagtcctgcaccaggactggctgaatggcaaggagtacaagtgcaaggtctccaacaaagccctcccagcccccattgagaaaaccatctccaaagccaaagggcagcccagagaaccacaggtgtacaccctgcccccatccagagatgagctgaccaagaaccaggtcagcctgacctgcctggtcaaaggcttctatccctctgacattgctgtggagtgggagagcaatgggcagcctgagaacaactacaagaccacacctcttgtgctggactctgatggctccttcttcctctacagcaagctcacagtggacaagagcagatggcagcaggggaatgtcttctcatgctctgtgatgcatgaggctctgcacaaccactacacccagaagagcctctccctgtctccaggtaaaagaaagaggagagagggcagaggaagtcttctaacatgtggtgatgtggaggagaatcctggccctatggacatgagggtccctgctcagctcctggggctcctgctgctctggctctcaggtgccagatgtgatatccagatgacccagtcccctagctccctgtctgcctctgtgggagatagggtcaccatcacctgtagagccagtcaggatgtgaatactgctgtagcctggtatcaacagaaaccaggaaaagctcctaaactactgatttactctgcatccttcctctactctggagtcccttctaggttctctggatccagatctgggactgatttcactctgaccatcagcagtctgcagccagaagactttgcaacttattactgtcagcaacattatactactcctcccacttttggacagggtaccaaggtggagatcaaaagaactgtggctgcaccatctgtcttcatcttcccaccatctgatgagcagttgaaatctggaactgcctctgttgtgtgcctgctgaataacttctatcccagagaggccaaagtacagtggaaggtggataatgccctccaatcaggtaactcccaggagagtgtcacagagcaggacagcaaggacagcacctacagcctcagcagcaccctgactctgagcaaagcagactatgagaaacacaaagtctatgcctgtgaagtcacccatcagggcctgagctctcctgtcacaaagagcttcaacaggggagagtgttagtagtaactcgaggacggggtgaactacgcctgaggatccgatctttttccctctgccaaaaattatggggacatcatgaagccccttgagcatctgacttctggctaataaaggaaatttattttcattgcaatagtgtgttggaattttttgtgtctctcactcggcctaggtagataagtagcatggcgggttaatcattaactacaaggaacccctagtgatggagttggccactccctctctgcgcgctcgctcgctcactgaggccgggcgaccaaaggtcgcccgacgcccgggctttgcccgggcggcctcagtgagcgagcgagcgcgcag

SEQ ID NO: 6551 - protein, 17 aa, synthetic construct
TINGSGSPHKYGQNQQT

SEQ ID NO: 6552 - DNA, 360 bp, synthetic construct
  source 1..360: mol_type = other DNA
gaggttcagctggtggagtctggtggtggcctggtgcagccagggggctcactcagattgtcctgtgcagcttctggcttcaacattaaagacacctatatacactgggtgagacaggcccctggaaagggcctggaatgggttgcaaggatttatcctactaatggttatactagatatgcagatagtgtcaagggcagattcactataagtgcagacacatccaaaaacacagcctacctgcagatgaacagcctgagagctgaggacactgcagtctattattgttctagatggggaggggatggcttctatgctatggactactggggtcaaggaaccctggtcacagtctcctct

SEQ ID NO: 6553 - DNA, 2226 bp, synthetic construct
  source 1..2226: mol_type = other DNA
atggctgccgatggttatcttccagattggctcgaggacaaccttagtgaaggaattcgcgagtggtgggctttgaaacctggagcccctcaacccaaggcaaatcaacaacatcaagacaacgctcgaggtcttgtgcttccgggttacaaataccttggacccggcaacggactcgacaagggggagccggtcaacgcagcagacgcggcggccctcgagcacgacaaggcctacgaccagcagctcaaggccggagacaacccgtacctcaagtacaaccacgccgacgccgagttccaggagcggctcaaagaagatacgtcttttgggggcaacctcgggcgagcagtcttccaggccaaaaagaggcttcttgaacctcttggtctggttgaggaagcggctaagacggctcctggaaagaagaggcctgtagagcagtctcctcaggaaccggactcctccgcgggtattggcaaatcgggtgcacagcccgctaaaaagagactcaatttcggtcagactggcgacacagagtcagtcccagaccctcaaccaatcggagaacctcccgcagccccctcaggtgtgggatctcttacaatggcttcaggtggtggcgcaccagtggcagacaataacgaaggtgccgatggagtgggtagttcctcgggaaattggcattgcgattcccaatggctgggggacagagtcatcaccaccagcacccgaacctgggccctgcccacctacaacaatcacctctacaagcaaatctccaacagcacatctggaggatcttcaaatgacaacgcctacttcggctacagcaccccctgggggtattttgacttcaacagattccactgccacttctcaccacgtgactggcagcgactcatcaacaacaactggggattccggcctaagcgactcaacttcaagctcttcaacattcaggtcaaagaggttacggacaacaatggagtcaagaccatcgccaataaccttaccagcacggtccaggtcttcacggactcagactatcagctcccgtacgtgctcgggtcggctcacgagggctgcctcccgccgttcccagcggacgttttcatgattcctcagtacgggtatctgacgcttaatgatggaagccaggccgtgggtcgttcgtccttttactgcctggaatatttcccgtcgcaaatgctaagaacgggtaacaacttccagttcagctacgagtttgagaacgtacctttccatagcagctacgctcacagccaaagcctggaccgactaatgaatccactcatcgatcagtatctgtattacttgagtaagacggagcgtgtgtctggttctccgcattctaaggcgcagaatcagcagacgttgaagttttcggtagctggtcctagcaacatggctgtccagggaagaaactacatacctggacccagctaccgacaacaacgtgtctcaaccactgtgactcaaaacaacaacagcgaatttgcttggcctggagcttcttcttgggctctcaatggacgtaatagcttgatgaatcctggacctgctatggccagccacaaagaaggagaggaccgtttctttcctttgtctggatctttaatttttggcaaacaaggaactggaagagacaacgtggatgcggacaaagtcatgataaccaacgaagaagaaattaaaactactaacccggtagcaacggagtcctatggacaagtggccacaaaccaccagagtgcccaagcacaggcgcagaccggctgggttcaaaaccaaggaatacttccgggtatggtttggcaggacagagatgtgtacctgcaaggacccatttgggccaaaattcctcacacggacggcaactttcacccttctccgctgatgggagggtttggaatgaagcacccgcctcctcagatcctcatcaaaaacacacctgtacctgcggatcctccaacggccttcaacaaggacaagctgaactctttcatcacccagtattctactggccaagtcagcgtggagatcgagtgggagctgcagaaggaaaacagcaagcgctggaacccggagatccagtacacttccaactattacaagtctaataatgttgaatttgctgttaatactgaaggtgtatatagtgaaccccgccccattggcacgcggtatttaacgaggaactta

SEQ ID NO: 6554 - DNA, 2226 bp, synthetic construct
  source 1..2226: mol_type = other DNA
atggctgccgatggttatcttccagattggctcgaggacaaccttagtgaaggaattcgcgagtggtgggctttgaaacctggagcccctcaacccaaggcaaatcaacaacatcaagacaacgctcgaggtcttgtgcttccgggttacaaataccttggacccggcaacggactcgacaagggggagccggtcaacgcagcagacgcggcggccctcgagcacgacaaggcctacgaccagcagctcaaggccggagacaacccgtacctcaagtacaaccacgccgacgccgagttccaggagcggctcaaagaagatacgtcttttgggggcaacctcgggcgagcagtcttccaggccaaaaagaggcttcttgaacctcttggtctggttgaggaagcggctaagacggctcctggaaagaagaggcctgtagagcagtctcctcaggaaccggactcctccgcgggtattggcaaatcgggtgcacagcccgctaaaaagagactcaatttcggtcagactggcgacacagagtcagtcccagaccctcaaccaatcggagaacctcccgcagccccctcaggtgtgggatctcttacaatggcttcaggtggtggcgcaccagtggcagacaataacgaaggtgccgatggagtgggtagttcctcgggaaattggcattgcgattcccaatggctgggggacagagtcatcaccaccagcacccgaacctgggccctgcccacctacaacaatcacctctacaagcaaatctccaacagcacatctggaggatcttcaaatgacaacgcctacttcggctacagcaccccctgggggtattttgacttcaacagattccactgccacttctcaccacgtgactggcagcgactcatcaacaacaactggggattccggcctaagcgactcaacttcaagctcttcaacattcaggtcaaagaggttacggacaacaatggagtcaagaccatcgccaataaccttaccagcacggtccaggtcttcacggactcagactatcagctcccgtacgtgctcgggtcggctcacgagggctgcctcccgccgttcccagcggacgttttcatgattcctcagtacgggtatctgacgcttaatgatggaagccaggccgtgggtcgttcgtccttttactgcctggaatatttcccgtcgcaaatgctaagaacgggtaacaacttccagttcagctacgagtttgagaacgtacctttccatagcagctacgctcacagccaaagcctggaccgactaatgaatccactcatcgatcagtatctgtattacttgagtaaggcggagattggtcatgattctccgcataagtctggtcagaatcagcagacgttgaagttttcggtagctggtcctagcaacatggctgtccagggaagaaactacatacctggacccagctaccgacaacaacgtgtctcaaccactgtgactcaaaacaacaacagcgaatttgcttggcctggagcttcttcttgggctctcaatggacgtaatagcttgatgaatcctggacctgctatggccagccacaaagaaggagaggaccgtttctttcctttgtctggatctttaatttttggcaaacaaggaactggaagagacaacgtggatgcggacaaagtcatgataaccaacgaagaagaaattaaaactactaacccggtagcaacggagtcctatggacaagtggccacaaaccaccagagtgcccaagcacaggcgcagaccggctgggttcaaaaccaaggaatacttccgggtatggtttggcaggacagagatgtgtacctgcaaggacccatttgggccaaaattcctcacacggacggcaactttcacccttctccgctgatgggagggtttggaatgaagcacccgcctcctcagatcctcatcaaaaacacacctgtacctgcggatcctccaacggccttcaacaaggacaagctgaactctttaatcacccagtattctactggccaagtcagcgtggagatcgagtgggagctgcagaaggaaaacagcaagcgctggaacccggagatccagtacacttccaactattacaagtctaataatgttgaatttgctgttaatactgaaggtgtatatagtgaaccccgccccattggcacgcggtatttaacgaggaactta

SEQ ID NO: 6555 - DNA, 2226 bp, synthetic construct
  source 1..2226: mol_type = other DNA
atggctgccgatggttatcttccagattggctcgaggacaaccttagtgaaggaattcgcgagtggtgggctttgaaacctggagcccctcaacccaaggcaaatcaacaacatcaagacaacgctcgaggtcttgtgcttccgggttacaaataccttggacccggcaacggactcgacaagggggagccggtcaacgcagcagacgcggcggccctcgagcacgacaaggcctacgaccagcagctcaaggccggagacaacccgtacctcaagtacaaccacgccgacgccgagttccaggagcggctcaaagaagatacgtcttttgggggcaacctcgggcgagcagtcttccaggccaaaaagaggcttcttgaacctcttggtctggttgaggaagcggctaagacggctcctggaaagaagaggcctgtagagcagtctcctcaggaaccggactcctccgcgggtattggcaaatcgggtgcacagcccgctaaaaagagactcaatttcggtcagactggcgacacagagtcagtcccagaccctcaaccaatcggagaacctcccgcagccccctcaggtgtgggatctcttacaatggcttcaggtggtggcgcaccagtggcagacaataacgaaggtgccgatggagtgggtagttcctcgggaaattggcattgcgattcccaatggctgggggacagagtcatcaccaccagcacccgaacctgggccctgcccacctacaacaatcacctctacaagcaaatctccaacagcacatctggaggatcttcaaatgacaacgcctacttcggctacagcaccccctgggggtattttgacttcaacagattccactgccacttctcaccacgtgactggcagcgactcatcaacaacaactggggattccggcctaagcgactcaacttcaagctcttcaacattcaggtcaaagaggttacggacaacaatggagtcaagaccatcgccaataaccttaccagcacggtccaggtcttcacggactcagactatcagctcccgtacgtgctcgggtcggctcacgagggctgcctcccgccgttcccagcggacgttttcatgattcctcagtacgggtatctgacgcttaatgatggaagccaggccgtgggtcgttcgtccttttactgcctggaatatttcccgtcgcaaatgctaagaacgggtaacaacttccagttcagctacgagtttgagaacgtacctttccatagcagctacgctcacagccaaagcctggaccgactaatgaatccactcatcgatcagtatctgtattacttgagtaagacgattattggttctggttctccgcattctaaggcgcagaatcgtcatacgttgaagttttcggtagctggtcctagcaacatggctgtccagggaagaaactacatacctggacccagctaccgacaacaacgtgtctcaaccactgtgactcaaaacaacaacagcgaatttgcttggcctggagcttcttcttgggctctcaatggacgtaatagcttgatgaatcctggacctgctatggccagccacaaagaaggagaggaccgtttctttcctttgtctggatctttaatttttggcaaacaaggaactggaagagacaacgtggatgcggacaaagtcatgataaccaacgaagaagaaattaaaactactaacccggtagcaacggagtcctatggacaagtggccacaaaccaccagagtgcccaagcacaggcgcagaccggctgggttcaaaaccaaggaatacttccgggtatggtttggcaggacagagatgtgtacctgcaaggacccatttgggccaaaattcctcacacggacggcaactttcacccttctccgctgatgggagggtttggaatgaagcacccgcctcctcagatcctcatcaaaaacacacctgtacctgcggatcctccaacggccttcaacaaggacaagctgaactctttcatcacccagtattctactggccaagtcagcgtggagatcgagtgggagctgcagaaggaaaacagcaagcgctggaacccggagatccagtacacttccaactattacaagtctaataatgttgaatttgctgttaatactgaaggtgtatatagtgaaccccgccccattggcacgcggtatttaacgaggaactta

SEQ ID NO: 6556 - DNA, 2226 bp, synthetic construct
  source 1..2226: mol_type = other DNA
atggctgccgatggttatcttccagattggctcgaggacaaccttagtgaaggaattcgcgagtggtgggctttgaaacctggagcccctcaacccaaggcaaatcaacaacatcaagacaacgctcgaggtcttgtgcttccgggttacaaataccttggacccggcaacggactcgacaagggggagccggtcaacgcagcagacgcggcggccctcgagcacgacaaggcctacgaccagcagctcaaggccggagacaacccgtacctcaagtacaaccacgccgacgccgagttccaggagcggctcaaagaagatacgtcttttgggggcaacctcgggcgagcagtcttccaggccaaaaagaggcttcttgaacctcttggtctggttgaggaagcggctaagacggctcctggaaagaagaggcctgtagagcagtctcctcaggaaccggactcctccgcgggtattggcaaatcgggtgcacagcccgctaaaaagagactcaatttcggtcagactggcgacacagagtcagtcccagaccctcaaccaatcggagaacctcccgcagccccctcaggtgtgggatctcttacaatggcttcaggtggtggcgcaccagtggcagacaataacgaaggtgccgatggagtgggtagttcctcgggaaattggcattgcgattcccaatggctgggggacagagtcatcaccaccagcacccgaacctgggccctgcccacctacaacaatcacctctacaagcaaatctccaacagcacatctggaggatcttcaaatgacaacgcctacttcggctacagcaccccctgggggtattttgacttcaacagattccactgccacttctcaccacgtgactggcagcgactcatcaacaacaactggggattccggcctaagcgactcaacttcaagctcttcaacattcaggtcaaagaggttacggacaacaatggagtcaagaccatcgccaataaccttaccagcacggtccaggtcttcacggactcagactatcagctcccgtacgtgctcgggtcggctcacgagggctgcctcccgccgttcccagcggacgttttcatgattcctcagtacgggtatctgacgcttaatgatggaagccaggccgtgggtcgttcgtccttttactgcctggaatatttcccgtcgcaaatgctaagaacgggtaacaacttccagttcagctacgagtttgagaacgtacctttccatagcagctacgctcacagccaaagcctggaccgactaatgaatccactcatcgatcagtatctgtattacttgagtaagacggagaagatgtctggttctccgcattctaaggcgcagaatcagcagacgttgaagttttcggtagctggtcctagcaacatggctgtccagggaagaaactacatacctggacccagctaccgacaacaacgtgtctcaaccactgtgactcaaaacaacaacagcgaatttgcttggcctggagcttcttcttgggctctcaatggacgtaatagcttgatgaatcctggacctgctatggccagccacaaagaaggagaggaccgtttctttcctttgtctggatctttaatttttggcaaacaaggaactggaagagacaacgtggatgcggacaaagtcatgataaccaacgaagaagaaattaaaactactaacccggtagcaacggagtcctatggacaagtggccacaaaccaccagagtgcccaagcacaggcgcagaccggctgggttcaaaaccaaggaatacttccgggtatggtttggcaggacagagatgtgtacctgcaaggacccatttgggccaaaattcctcacacggacggcaactttcacccttctccgctgatgggagggtttggaatgaagcacccgcctcctcagatcctcatcaaaaacacacctgtacctgcggatcctccaacggccttcaacaaggacaagctgaactctttcatcacccagtattctactggccaagtcagcgtggagatcgagtgggagctgcagaaggaaaacagcaagcgctggaacccggagatccagtacacttccaactattacaagtctaataatgttgaatttgctgttaatactgaaggtgtatatagtgaaccccgccccattggcacgcggtatttaacgaggaactta

SEQ ID NO: 6557 - DNA, 12 bp, synthetic construct
  source 1..12: mol_type = other DNA
agaaagaggaga

SEQ ID NO: 6558 - DNA, 54 bp, synthetic construct
  source 1..54: mol_type = other DNA
gagggcagaggaagtcttctaacatgtggtgatgtggaggagaatcctggccct

SEQ ID NO: 6559 - DNA, 130 bp, synthetic construct
  source 1..130: mol_type = other DNA
ctgcgcgctcgctcgctcactgaggccgcccgggcaaagcccgggcgtcgggcgacctttggtcgcccggcctcagtgagcgagcgagcgcgcagagagggagtggccaactccatcactaggggttcct

SEQ ID NO: 6560 - DNA, 141 bp, synthetic construct
  source 1..141: mol_type = other DNA
cctgcaggcagctgcgcgctcgctcgctcactgaggccgcccgggcaaagcccgggcgtcgggcgacctttggtcgcccggcctcagtgagcgagcgagcgcgcagagagggagtggccaactccatcactaggggttcct

SEQ ID NO: 6561 - DNA, 130 bp, synthetic construct
  source 1..130: mol_type = other DNA
aggaacccctagtgatggagttggccactccctctctgcgcgctcgctcgctcactgaggccgggcgaccaaaggtcgcccgacgcccgggctttgcccgggcggcctcagtgagcgagcgagcgcgcag

SEQ ID NO: 6562 - DNA, 141 bp, synthetic construct
  source 1..141: mol_type = other DNA
aggaacccctagtgatggagttggccactccctctctgcgcgctcgctcgctcactgaggccgggcgaccaaaggtcgcccgacgcccgggctttgcccgggcggcctcagtgagcgagcgagcgcgcagctgcctgcagg

SEQ ID NO: 6563 - DNA, 1715 bp, synthetic construct
  source 1..1715: mol_type = other DNA
ctagttattaatagtaatcaattacggggtcattagttcatagcccatatatggagttccgcgttacataacttacggtaaatggcccgcctggctgaccgcccaacgacccccgcccattgacgtcaataatgacgtatgttcccatagtaacgccaatagggactttccattgacgtcaatgggtggagtatttacggtaaactgcccacttggcagtacatcaagtgtatcatatgccaagtacgccccctattgacgtcaatgacggtaaatggcccgcctggcattatgcccagtacatgaccttatgggactttcctacttggcagtacatctacgtattagtcatcgctattaccatggtcgaggtgagccccacgttctgcttcactctccccatctcccccccctccccacccccaattttgtatttatttattttttaattattttgtgcagcgatgggggcggggggggggggggggcgcgcgccaggcggggcggggcggggcgaggggcggggcggggcgaggcggagaggtgcggcggcagccaatcagagcggcgcgctccgaaagtttccttttatggcgaggcggcggcggcggcggccctataaaaagcgaagcgcgcggcgggcgggagtcgctgcgcgctgccttcgccccgtgccccgctccgccgccgcctcgcgccgcccgccccggctctgactgaccgcgttactcccacaggtgagcgggcgggacggcccttctcctccgggctgtaattagcgcttggtttaatgacggcttgtttcttttctgtggctgcgtgaaagccttgaggggctccgggagggccctttgtgcggggggagcggctcggggggtgcgtgcgtgtgtgtgtgcgtggggagcgccgcgtgcggctccgcgctgcccggcggctgtgagcgctgcgggcgcggcgcggggctttgtgcgctccgcagtgtgcgcgaggggagcgcggccgggggcggtgccccgcggtgcggggggggctgcgaggggaacaaaggctgcgtgcggggtgtgtgcgtgggggggtgagcagggggtgtgggcgcgtcggtcgggctgcaaccccccctgcacccccctccccgagttgctgagcacggcccggcttcgggtgcggggctccgtacggggcgtggcgcggggctcgccgtgccgggcggggggtggcggcaggtgggggtgccgggcggggcggggccgcctcgggccggggagggctcgggggaggggcgcggcggcccccggagcgccggcggctgtcgaggcgcggcgagccgcagccattgccttttatggtaatcgtgcgagagggcgcagggacttcctttgtcccaaatctgtgcggagccgaaatctgggaggcgccgccgcaccccctctagcgggcgcggggcgaagcggtgcggcgccggcaggaaggaaatgggcggggagggccttcgtgcgtcgccgcgccgccgtccccttctccctctccagcctcggggctgtccgcggggggacggctgccttcgggggggacggggcagggcggggttcggcttctggcgtgtgaccggcggctctagagcctctgctaaccatgttcatgccttcttctttttcctacagctcctgggcaacgtgctggttattgtgctgtctcatcattttggcaaagaattc

SEQ ID NO: 6564 - DNA, 299 bp, synthetic construct
  source 1..299: mol_type = other DNA
tagcccatatatggagttccgcgttacataacttacggtaaatggcccgcctggctgaccgcccaacgacccccgcccattgacgtcaataatgacgtatgttcccatagtaacgccaatagggactttccattgacgtcaatgggtggagtatttacggtaaactgcccacttggcagtacatcaagtgtatcatatgccaagtacgccccctattgacgtcaatgacggtaaatggcccgcctggcattatgcccagtacatgaccttatgggactttcctacttggcagtacatct

SEQ ID NO: 6565 - DNA, 283 bp, synthetic construct
  source 1..283: mol_type = other DNA
catggtcgaggtgagccccacgttctgcttcactctccccatctcccccccctccccacccccaattttgtatttatttattttttaattattttgtgcagcgatgggggcggggggggggggggggcgcgcgccaggcggggcggggcggggcgaggggcggggcggggcgaggcggagaggtgcggcggcagccaatcagagcggcgcgctccgaaagtttccttttatggcgaggcggcggcggcggcggccctataaaaagcgaagcgcgcggcgggcg

SEQ ID NO: 6566 - DNA, 260 bp, synthetic construct
  source 1..260: mol_type = other DNA
ccacgttctgcttcactctccccatctcccccccctccccacccccaattttgtatttatttattttttaattattttgtgcagcgatgggggcggggggggggggcgcgcgccaggcggggcggggcggggcgaggggcggggcggggcgaggcggagaggtgcggcggcagccaatcagagcggcgcgctccgaaagtttccttttatggcgaggcggcggcggcggcggccctataaaaagcgaagcgcgcggcggg

SEQ ID NO: 6567 - DNA, 654 bp, synthetic construct
  source 1..654: mol_type = other DNA
cgacattgattattgactagttattaatagtaatcaattacggggtcattagttcatagcccatatatggagttccgcgttacataacttacggtaaatggcccgcctggctgaccgcccaacgacccccgcccattgacgtcaataatgacgtatgttcccatagtaacgccaatagggactttccattgacgtcaatgggtggagtatttacggtaaactgcccacttggcagtacatcaagtgtatcatatgccaagtacgccccctattgacgtcaatgacggtaaatggcccgcctggcattatgcccagtacatgaccttatgggactttcctacttggcagtacatctacgtattagtcatcgctattaccatgtcgaggccacgttctgcttcactctccccatctcccccccctccccacccccaattttgtatttatttattttttaattattttgtgcagcgatgggggcggggggggggggcgcgcgccaggcggggcggggcggggcgaggggcggggcggggcgaggcggagaggtgcggcggcagccaatcagagcggcgcgctccgaaagtttccttttatggcgaggcggcggcggcggcggccctataaaaagcgaagcgcgcggcgggcgggagc

SEQ ID NO: 6568 - DNA, 699 bp, synthetic construct
  source 1..699: mol_type = other DNA
gatctaacatatcctggtgtggagtagcggacgctgctatgacagaggctcgggggcctgagctggctctgtgagctggggaggaggcagacagccaggccttgtctgcaagcagacctggcagcattgggctggccgccccccagggcctcctcttcatgcccagtgaatgactcaccttggcacagacacaatgttcggggtgggcacagtgcctgcttcccgccgcaccccagcccccctcaaatgccttccgagaagcccattgagcagggggcttgcattgcaccccagcctgacagcctggcatcttgggataaaagcagcacagccccctaggggctgcccttgctgtgtggcgccaccggcggtggagaacaaggctctattcagcctgtgcccaggaaaggggatcaggggatgcccaggcatggacagtgggtggcagggggggagaggagggctgtctgcttcccagaagtccaaggacacaaatgggtgaggggagagctctccccatagctgggctgcggcccaaccccaccccctcaggctatgccagggggtgttgccaggggcacccgggcatcgccagtctagcccactccttcataaagccctcgcatcccaggagcgagcagagccagagcaggttggagaggagacgcatcacctccgctgctcgcggggatcctctag

SEQ ID NO: 6569 - DNA, 557 bp, synthetic construct
  source 1..557: mol_type = other DNA
tagtatctgcagagggccctgcgtatgagtgcaagtgggttttaggaccaggatgaggcggggtgggggtgcctacctgacgaccgaccccgacccactggacaagcacccaacccccattccccaaattgcgcatcccctatcagagagggggaggggaaacaggatgcggcgaggcgcgtgcgcactgccagcttcagcaccgcggacagtgccttcgcccccgcctggcggcgcgcgccaccgccgcctcagcactgaaggcgcgctgacgtcactcgccggtcccccgcaaactccccttcccggccaccttggtcgcgtccgcgccgccgccggcccagccggaccgcaccacgcgaggcgcgagataggggggcacgggcgcgaccatctgcgctgcggcgccggcgactcagcgctgcctcagtctgcggtgggcagcggaggagtcgtgtcgtgcctgagagcgcagctgtgctcctgggcaccgcgcagtccgcccccgcggctcctggccagaccacccctaggaccccctgccccaagtcgcagcc

SEQ ID NO: 6570 - DNA, 382 bp, synthetic construct
  source 1..382: mol_type = other DNA
ctagtcgacattgattattgactagttattaatagtaatcaattacggggtcattagttcatagcccatatatggagttccgcgttacataacttacggtaaatggcccgcctggctgaccgcccaacgacccccgcccattgacgtcaataatgacgtatgttcccatagtaacgccaatagggactttccattgacgtcaatgggtggagtatttacggtaaactgcccacttggcagtacatcaagtgtatcatatgccaagtacgccccctattgacgtcaatgacggtaaatggcccgcctggcattatgcccagtacatgaccttatgggactttcctacttggcagtacatctacgtattagtcatcgctattac

SEQ ID NO: 6571 - DNA, 1736 bp, synthetic construct
  source 1..1736: mol_type = other DNA
ctagtcgacattgattattgactagttattaatagtaatcaattacggggtcattagttcatagcccatatatggagttccgcgttacataacttacggtaaatggcccgcctggctgaccgcccaacgacccccgcccattgacgtcaataatgacgtatgttcccatagtaacgccaatagggactttccattgacgtcaatgggtggagtatttacggtaaactgcccacttggcagtacatcaagtgtatcatatgccaagtacgccccctattgacgtcaatgacggtaaatggcccgcctggcattatgcccagtacatgaccttatgggactttcctacttggcagtacatctacgtattagtcatcgctattaccatggtcgaggtgagccccacgttctgcttcactctccccatctcccccccctccccacccccaattttgtatttatttattttttaattattttgtgcagcgatgggggcggggggggggggggggcgcgcgccaggcggggcggggcggggcgaggggcggggcggggcgaggcggagaggtgcggcggcagccaatcagagcggcgcgctccgaaagtttccttttatggcgaggcggcggcggcggcggccctataaaaagcgaagcgcgcggcgggcgggagtcgctgcgcgctgccttcgccccgtgccccgctccgccgccgcctcgcgccgcccgccccggctctgactgaccgcgttactcccacaggtgagcgggcgggacggcccttctcctccgggctgtaattagcgcttggtttaatgacggcttgtttcttttctgtggctgcgtgaaagccttgaggggctccgggagggccctttgtgcggggggagcggctcggggggtgcgtgcgtgtgtgtgtgcgtggggagcgccgcgtgcggctccgcgctgcccggcggctgtgagcgctgcgggcgcggcgcggggctttgtgcgctccgcagtgtgcgcgaggggagcgcggccgggggcggtgccccgcggtgcggggggggctgcgaggggaacaaaggctgcgtgcggggtgtgtgcgtgggggggtgagcagggggtgtgggcgcgtcggtcgggctgcaaccccccctgcacccccctccccgagttgctgagcacggcccggcttcgggtgcggggctccgtacggggcgtggcgcggggctcgccgtgccgggcggggggtggcggcaggtgggggtgccgggcggggcggggccgcctcgggccggggagggctcgggggaggggcgcggcggcccccggagcgccggcggctgtcgaggcgcggcgagccgcagccattgccttttatggtaatcgtgcgagagggcgcagggacttcctttgtcccaaatctgtgcggagccgaaatctgggaggcgccgccgcaccccctctagcgggcgcggggcgaagcggtgcggcgccggcaggaaggaaatgggcggggagggccttcgtgcgtcgccgcgccgccgtccccttctccctctccagcctcggggctgtccgcggggggacggctgccttcgggggggacggggcagggcggggttcggcttctggcgtgtgaccggcggctctagagcctctgctaaccatgttcatgccttcttctttttcctacagctcctgggcaacgtgctggttattgtgctgtctcatcattttggcaaagaattc

SEQ ID NO: 6572 - DNA, 365 bp, synthetic construct
  source 1..365: mol_type = other DNA
ctagtcgacattgattattgactagttattaatagtaatcaattacggggtcattagttcatagcccatatatggagttccgcgttacataacttacggtaaatggcccgcctggctgaccgcccaacgacccccgcccattgacgtcaataatgacgtatgttcccatagtaacgccaatagggactttccattgacgtcaatgggtggagtatttacggtaaactgcccacttggcagtacatcaagtgtatcatatgccaagtacgccccctattgacgtcaatgacggtaaatggcccgcctggcattatgcccagtacatgaccttatgggactttcctacttggcagtacatctacgta

SEQ ID NO: 6573 - DNA, 134 bp, synthetic construct
  source 1..134: mol_type = other DNA
tcagatcgcctggagacgccatccacgctgttttgacctccatagaagacaccgggaccgatccagcctccgcggattcgaatcccggccgggaacggtgcattggaacgcggattccccgtgccaagagtgac

SEQ ID NO: 6574 - DNA, 102 bp, synthetic construct
  source 1..102: mol_type = other DNA
ttgacctccatagaagacaccgggaccgatccagcctccgcggattcgaatcccggccgggaacggtgcattggaacgcggattccccgtgccaagagtgac

SEQ ID NO: 6575 - DNA, 59 bp, synthetic construct
  source 1..59: mol_type = other DNA
attcgaatcccggccgggaacggtgcattggaacgcggattccccgtgccaagagtgac

SEQ ID NO: 6576 - DNA, 53 bp, synthetic construct
  source 1..53: mol_type = other DNA
ctcctgggcaacgtgctggtctgtgtgctggcccatcactttggcaaagaatt

SEQ ID NO: 6577 - DNA, 54 bp, synthetic construct
  source 1..54: mol_type = other DNA
ctcctgggcaacgtgctggttattgtgctgtctcatcattttggcaaagaattc

SEQ ID NO: 6578 - DNA, 32 bp, synthetic construct
  source 1..32: mol_type = other DNA
gtaagtaccgcctatagagtctataggcccac

SEQ ID NO: 6579 - DNA, 15 bp, synthetic construct
  source 1..15: mol_type = other DNA
gtaagtaccgcctat

SEQ ID NO: 6580 - DNA, 347 bp, synthetic construct
  source 1..347: mol_type = other DNA
aaaaaatgctttcttcttttaatatacttttttgtttatcttatttctaatactttccctaatctctttctttcagggcaataatgatacaatgtatcatgcctctttgcaccattctaaagaataacagtgataatttctgggttaaggcaatagcaatatttctgcatataaatatttctgcatataaattgtaactgatgtaagaggtttcatattgctaatagcagctacaatccagctaccattctgcttttattttatggttgggataaggctggattattctgagtccaagctaggcccttttgctaatcatgttcatacctcttatcttcctcccacag

SEQ ID NO: 6581 - DNA, 168 bp, synthetic construct
  source 1..168: mol_type = other DNA
tctgcatataaattgtaactgatgtaagaggtttcatattgctaatagcagctacaatccagctaccattctgcttttattttatggttgggataaggctggattattctgagtccaagctaggcccttttgctaatcatgttcatacctcttatcttcctcccacag

SEQ ID NO: 6582 - DNA, 73 bp, synthetic construct
  source 1..73: mol_type = other DNA
aaaaaatgctttcttcttttaatatacttttcttttgctaatcatgttcatacctcttatcttcctcccacag

SEQ ID NO: 6583 - DNA, 73 bp, synthetic construct
  source 1..73: mol_type = other DNA
aggctggattattctgagtccaagctaggcccttttgctaatcatgttcatacctcttatcttcctcccacag

SEQ ID NO: 6584 - DNA, 73 bp, synthetic construct
  source 1..73: mol_type = other DNA
aaaaaatgctttcttcttttcaagctaggcccttttgctaatcatgttcatacctcttatcttcctcccacag

SEQ ID NO: 6585 - DNA, 53 bp, synthetic construct
  source 1..53: mol_type = other DNA
caagctaggcccttttgctaatcatgttcatacctcttatcttcctcccacag

SEQ ID NO: 6586 - DNA, 172 bp, synthetic construct
  source 1..172: mol_type = other DNA
gaactgaaaaaccagaaagttaactggtaagtttagtctttttgtcttttatttcaggtcccggatccggtggtggtgcaaatcaaagaactgctcctcagtggatgttgcctttacttctaggcctgtacggaagtgttacttctgctctaaaagctgcggaattgtaccc

SEQ ID NO: 6587 - DNA, 1074 bp, synthetic construct
  source 1..1074: mol_type = other DNA
ggagtcgctgcgcgctgccttcgccccgtgccccgctccgccgccgcctcgcgccgcccgccccggctctgactgaccgcgttactcccacaggtgagcgggcgggacggcccttctcctccgggctgtaattagcgcttggtttaatgacggcttgtttcttttctgtggctgcgtgaaagccttgaggggctccgggagggccctttgtgcggggggagcggctcggggggtgcgtgcgtgtgtgtgtgcgtggggagcgccgcgtgcggctccgcgctgcccggcggctgtgagcgctgcgggcgcggcgcggggctttgtgcgctccgcagtgtgcgcgaggggagcgcggccgggggcggtgccccgcggtgcggggggggctgcgaggggaacaaaggctgcgtgcggggtgtgtgcgtgggggggtgagcagggggtgtgggcgcgtcggtcgggctgcaaccccccctgcacccccctccccgagttgctgagcacggcccggcttcgggtgcggggctccgtacggggcgtggcgcggggctcgccgtgccgggcggggggtggcggcaggtgggggtgccgggcggggcggggccgcctcgggccggggagggctcgggggaggggcgcggcggcccccggagcgccggcggctgtcgaggcgcggcgagccgcagccattgccttttatggtaatcgtgcgagagggcgcagggacttcctttgtcccaaatctgtgcggagccgaaatctgggaggcgccgccgcaccccctctagcgggcgcggggcgaagcggtgcggcgccggcaggaaggaaatgggcggggagggccttcgtgcgtcgccgcgccgccgtccccttctccctctccagcctcggggctgtccgcggggggacggctgccttcgggggggacggggcagggcggggttcggcttctggcgtgtgaccggcggctctagagcctctgctaaccatgttcatgccttcttctttttcctacagctcctgggcaacgtgctggttattgtgctgtctcatcattttggcaaagaattcgag

SEQ ID NO: 6588 - DNA, 41 bp, synthetic construct
  source 1..41: mol_type = other DNA
cctctgctaaccatgttcatgccttcttctttttcctacag

SEQ ID NO: 6589 - DNA, 12 bp, synthetic construct
  source 1..12: mol_type = other DNA
gccgccaccatg

SEQ ID NO: 6590 - DNA, 127 bp, synthetic construct
  source 1..127: mol_type = other DNA
gatctttttccctctgccaaaaattatggggacatcatgaagccccttgagcatctgacttctggctaataaaggaaatttattttcattgcaatagtgtgttggaattttttgtgtctctcactcg

SEQ ID NO: 6591 - DNA, 477 bp, synthetic construct
  source 1..477: mol_type = other DNA
gggtggcatccctgtgacccctccccagtgcctctcctggccctggaagttgccactccagtgcccaccagccttgtcctaataaaattaagttgcatcattttgtctgactaggtgtccttctataatattatggggtggaggggggtggtatggagcaaggggcaagttgggaagacaacctgtagggcctgcggggtctattgggaaccaagctggagtgcagtggcacaatcttggctcactgcaatctccgcctcctgggttcaagcgattctcctgcctcagcctcccgagttgttgggattccaggcatgcatgaccaggctcagctaatttttgtttttttggtagagacggggtttcaccatattggccaggctggtctccaactcctaatctcaggtgatctacccaccttggcctcccaaattgctgggattacaggcgtgaaccactgctcccttccctgtcctt

SEQ ID NO: 6592 - DNA, 552 bp, synthetic construct
  source 1..552: mol_type = other DNA
gaattcactcctcaggtgcaggctgcctatcagaaggtggtggctggtgtggccaatgccctggctcacaaataccactgagatctttttccctctgccaaaaattatggggacatcatgaagccccttgagcatctgacttctggctaataaaggaaatttattttcattgcaatagtgtgttggaattttttgtgtctctcactcggaaggacatatgggagggcaaatcatttaaaacatcagaatgagtatttggtttagagtttggcaacatatgcccatatgctggctgccatgaacaaaggttggctataaagaggtcatcagtatatgaaacagccccctgctgtccattccttattccatagaaaagccttgacttgaggttagattttttttatattttgttttgtgttatttttttctttaacatccctaaaattttccttacatgttttactagccagatttttcctcctctcctgactactcccagtcatagctgtccctcttctcttatggagatccctcgacctgcagcccaagctt

SEQ ID NO: 6593 - DNA, 1714 bp, synthetic construct
  source 1..1714: mol_type = other DNA
ctagttattaatagtaatcaattacggggtcattagttcatagcccatatatggagttccgcgttacataacttacggtaaatggcccgcctggctgaccgcccaacgacccccgcccattgacgtcaataatgacgtatgttcccatagtaacgccaatagggactttccattgacgtcaatgggtggagtatttacggtaaactgcccacttggcagtacatcaagtgtatcatatgccaagtacgccccctattgacgtcaatgacggtaaatggcccgcctggcattatgcccagtacatgaccttatgggactttcctacttggcagtacatctacgtattagtcatcgctattaccatggtcgaggtgagccccacgttctgcttcactctccccatctcccccccctccccacccccaattttgtatttatttattttttaattattttgtgcagcgatgggggcggggggggggggggggcgcgcgccaggcggggcggggcggggcgaggggcggggcggggcgaggcggagaggtgcggcggcagccaatcagagcggcgcgctccgaaagtttccttttatggcgaggcggcggcggcggcggccctataaaaagcgaagcgcgcggcgggcgggagtcgctgcgcgctgccttcgccccgtgccccgctccgccgccgcctcgcgccgcccgccccggctctgactgaccgcgttactcccacaggtgagcgggcgggacggcccttctcctccgggctgtaattagcgcttggtttaatgacggcttgtttcttttctgtggctgcgtgaaagccttgaggggctccgggagggccctttgtgcggggggagcggctcggggggtgcgtgcgtgtgtgtgtgcgtggggagcgccgcgtgcggctccgcgctgcccggcggctgtgagcgctgcgggcgcggcgcggggctttgtgcgctccgcagtgtgcgcgaggggagcgcggccgggggcggtgccccgcggtgcggggggggctgcgaggggaacaaaggctgcgtgcggggtgtgtgcgtgggggggtgagcagggggtgtgggcgcgtcggtcgggctgcaaccccccctgcacccccctccccgagttgctgagcacggcccggcttcgggtgcggggctccgtacggggcgtggcgcggggctcgccgtgccgggcggggggtggcggcaggtgggggtgccgggcggggcggggccgcctcgggccggggagggctcgggggaggggcgcggcggcccccggagcgccggcggctgtcgaggcgcggcgagccgcagccattgccttttatggtaatcgtgcgagagggcgcagggacttcctttgtcccaaatctgtgcggagccgaaatctgggaggcgccgccgcaccccctctagcgggcgcggggcgaagcggtgcggcgccggcaggaaggaaatgggcggggagggccttcgtgcgtcgccgcgccgccgtccccttctccctctccagcctcggggctgtccgcggggggacggctgccttcgggggggacggggcagggcggggttcggcttctggcgtgtgaccggcggctctagagcctctgctaaccatgttcatgccttcttctttttcctacagctcctgggcaacgtgctggttattgtgctgtctcatcattttggcaaagaatt

SEQ ID NO: 6594 - DNA, 380 bp, synthetic construct
  source 1..380: mol_type = other DNA
gacattgattattgactagttattaatagtaatcaattacggggtcattagttcatagcccatatatggagttccgcgttacataacttacggtaaatggcccgcctggctgaccgcccaacgacccccgcccattgacgtcaataatgacgtatgttcccatagtaacgccaatagggactttccattgacgtcaatgggtggagtatttacggtaaactgcccacttggcagtacatcaagtgtatcatatgccaagtacgccccctattgacgtcaatgacggtaaatggcccgcctggcattatgcccagtacatgaccttatgggactttcctacttggcagtacatctacgtattagtcatcgctattaccatg

SEQ ID NO: 6595 - DNA, 566 bp, synthetic construct
  source 1..566: mol_type = other DNA
tcagatcgcctggagacgccatccacgctgttttgacctccatagaagacaccgggaccgatccagcctccgcggattcgaatcccggccgggaacggtgcattggaacgcggattccccgtgccaagagtgacgtaagtaccgcctatagagtctataggcccacaaaaaatgctttcttcttttaatatacttttttgtttatcttatttctaatactttccctaatctctttctttcagggcaataatgatacaatgtatcatgcctctttgcaccattctaaagaataacagtgataatttctgggttaaggcaatagcaatatttctgcatataaatatttctgcatataaattgtaactgatgtaagaggtttcatattgctaatagcagctacaatccagctaccattctgcttttattttatggttgggataaggctggattattctgagtccaagctaggcccttttgctaatcatgttcatacctcttatcttcctcccacagctcctgggcaacgtgctggtctgtgtgctggcccatcactttggcaaagaatt

SEQ ID NO: 6596 - DNA, 198 bp, synthetic construct
  source 1..198: mol_type = other DNA
gagctcaaaaccccacttggtgacacaactcacacatgcccacggtgcccagagcccaaatcttgtgacacacctcccccgtgcccacggtgcccagagcccaaatcttgtgacacaactcacacatgcccacggtgcccagagcccaaatcttgtgacacacctcccccgtgcccaaggtgcccagcacctgaactc

SEQ ID NO: 6597 - DNA, 15 bp, synthetic construct
  source 1..15: mol_type = other DNA
ggtggtggtggatcc

SEQ ID NO: 6598 - DNA, 30 bp, synthetic construct
  source 1..30: mol_type = other DNA
ggtggtggtggatccggtggtggtggatcc

SEQ ID NO: 6599 - DNA, 45 bp, synthetic construct
  source 1..45: mol_type = other DNA
ggtggtggtggatccggtggtggtggatccggtggtggtggatcc

SEQ ID NO: 6600 - DNA, 60 bp, synthetic construct
  source 1..60: mol_type = other DNA
ggtggtggtggatccggtggtggtggatccggtggtggtggatccggtggtggtggatcc

SEQ ID NO: 6601 - DNA, 75 bp, synthetic construct
  source 1..75: mol_type = other DNA
ggtggtggtggtagcggcggcggcggctctggtggtggtggatccggtggtggtggatccggtggtggtggatcc

SEQ ID NO: 6602 - DNA, 75 bp, synthetic construct
  source 1..75: mol_type = other DNA
ggtggtggtggatccggtggtggtggatccggtggtggtggatccggtggtggtggatccggtggtggtggatcc

SEQ ID NO: 6603 - DNA, 90 bp, synthetic construct
  source 1..90: mol_type = other DNA
ggtggtggtggtagcggcggcggcggctctggtggtggtggatccggtggtggtggatccggtggtggtggatccggtggtggtggatcc

SEQ ID NO: 6604 - DNA, 120 bp, synthetic construct
  source 1..120: mol_type = other DNA
ggtggtggtggtagcggcggcggcggctctggtggtggtggatccggtggtggtggatccggtggtggtggatccggtggtggtggatccggtggtggtggatccggtggtggtggatcc

SEQ ID NO: 6605 - DNA, 120 bp, synthetic construct
  source 1..120: mol_type = other DNA
ggtggtggtggatccggtggtggtggatccggtggtggtggatccggtggtggtggatccggtggtggtggatccggtggtggtggatccggtggtggtggatccggtggtggtggatcc

SEQ ID NO: 6606 - DNA, 60 bp, synthetic construct
  source 1..60: mol_type = other DNA
ggtggtggtggtagcggcggcggcggctctggtggtggtggatccggtggtggtggatcc

SEQ ID NO: 6607 - DNA, 491 bp, synthetic construct
  source 1..491: mol_type = other DNA
attcgaatcccggccgggaacggtgcattggaacgcggattccccgtgccaagagtgacgtaagtaccgcctatagagtctataggcccacaaaaaatgctttcttcttttaatatacttttttgtttatcttatttctaatactttccctaatctctttctttcagggcaataatgatacaatgtatcatgcctctttgcaccattctaaagaataacagtgataatttctgggttaaggcaatagcaatatttctgcatataaatatttctgcatataaattgtaactgatgtaagaggtttcatattgctaatagcagctacaatccagctaccattctgcttttattttatggttgggataaggctggattattctgagtccaagctaggcccttttgctaatcatgttcatacctcttatcttcctcccacagctcctgggcaacgtgctggtctgtgtgctggcccatcactttggcaaagaatt

SEQ ID NO: 6608 - DNA, 387 bp, synthetic construct
  source 1..387: mol_type = other DNA
tcagatcgcctggagacgccatccacgctgttttgacctccatagaagacaccgggaccgatccagcctccgcggattcgaatcccggccgggaacggtgcattggaacgcggattccccgtgccaagagtgacgtaagtaccgcctatagagtctataggcccactctgcatataaattgtaactgatgtaagaggtttcatattgctaatagcagctacaatccagctaccattctgcttttattttatggttgggataaggctggattattctgagtccaagctaggcccttttgctaatcatgttcatacctcttatcttcctcccacagctcctgggcaacgtgctggtctgtgtgctggcccatcactttggcaaagaatt

SEQ ID NO: 6609 - DNA, 292 bp, synthetic construct
  source 1..292: mol_type = other DNA
tcagatcgcctggagacgccatccacgctgttttgacctccatagaagacaccgggaccgatccaggtaagtaccgcctatagagtctataggcccacaaaaaatgctttcttcttttaatatacttttttgtttatcttatttctaatactttccctaatctctttcgctggattattctgagtccaagctaggcccttttgctaatcatgttcatacctcttatcttcctcccacagctcctgggcaacgtgctggtctgtgtgctggcccatcactttggcaaagaatt

SEQ ID NO: 6610 - DNA, 90 bp, synthetic construct
  source 1..90: mol_type = other DNA
ggtggtggtggatccggtggtggtggatccggtggtggtggatccggtggtggtggatccggtggtggtggatccggtggtggtggatcc

SEQ ID NO: 6611 - DNA, 4047 bp, synthetic construct
  source 1..4047: mol_type = other DNA
ctgcgcgctcgctcgctcactgaggccgcccgggcaaagcccgggcgtcgggcgacctttggtcgcccggcctcagtgagcgagcgagcgcgcagagagggagtggccaactccatcactaggggttccttgtagttaatgattaacccgccatgctacttatctaccagggtaatggggatcctctagaactatagctagtcgacataacgcgtgatctaacatatcctggtgtggagtagcggacgctgctatgacagaggctcgggggcctgagctggctctgtgagctggggaggaggcagacagccaggccttgtctgcaagcagacctggcagcattgggctggccgccccccagggcctcctcttcatgcccagtgaatgactcaccttggcacagacacaatgttcggggtgggcacagtgcctgcttcccgccgcaccccagcccccctcaaatgccttccgagaagcccattgagcagggggcttgcattgcaccccagcctgacagcctggcatcttgggataaaagcagcacagccccctaggggctgcccttgctgtgtggcgccaccggcggtggagaacaaggctctattcagcctgtgcccaggaaaggggatcaggggatgcccaggcatggacagtgggtggcagggggggagaggagggctgtctgcttcccagaagtccaaggacacaaatgggtgaggggagagctctccccatagctgggctgcggcccaaccccaccccctcaggctatgccagggggtgttgccaggggcacccgggcatcgccagtctagcccactccttcataaagccctcgcatcccaggagcgagcagagccagagcaggttggagaggagacgcatcacctccgctgctcgcggggatcctctagaagcttcgtttagtgaaccgtcagatcgcctggagacgccatccacgctgttttgacctccatagaagacaccgggaccgatccagcctccgcggattcgaatcccggccgggaacggtgcattggaacgcggattccccgtgccaagagtgacgtaagtaccgcctatagagtctataggcccacaaaaaatgctttcttcttttaatatacttttttgtttatcttatttctaatactttccctaatctctttctttcagggcaataatgatacaatgtatcatgcctctttgcaccattctaaagaataacagtgataatttctgggttaaggcaatagcaatatttctgcatataaatatttctgcatataaattgtaactgatgtaagaggtttcatattgctaatagcagctacaatccagctaccattctgcttttattttatggttgggataaggctggattattctgagtccaagctaggcccttttgctaatcatgttcatacctcttatcttcctcccacagctcctgggcaacgtgctggtctgtgtgctggcccatcactttggcaaagaattgggattcgaaccggtgccgccaccatggactggacctggaggttcctctttgtggtggcagcagctacaggtgtccagtctgaggttcagctggtggagtctggaggtggcctggtgcagccagggggctcactcagattgtcctgtgcagcttctggcttcaacattaaagacacctatatacactgggtgagacaggccccaggtaagggcctggaatgggttgcaaggatttatcctaccaatggttatactagatatgctgattctgtcaagggcagattcactatatctgcagacacatccaaaaacacagcctacctgcagatgaacagcctgagagctgaggacactgctgtctattattgttctagatggggaggggatggcttctatgctatggactactggggtcaaggaaccctggtcacagtctcctctgcctctaccaagggcccatctgtcttccccctggcaccctcctccaagagcacctctgggggcacagctgccctgggctgcctggtcaaggactacttccctgaacctgtgacagtctcctggaactcaggagccctgaccagtggagtgcacaccttccctgctgtcctacagtcctcaggactctactccctcagctctgtggtgacagtgccctccagcagcttgggcacccagacctacatctgcaatgtgaatcacaagcccagcaacaccaaggtggacaagagagttgagcccaaatcttgtgacaaaactcacacatgcccaccttgcccagcacctgaactggtggggggaccatcagtcttcctcctccccccaaaacccaaggacaccctcatgatctccagaacccctgaggtcacatgtgtggtggtggatgtgagccatgaagaccctgaggtcaagttcaactggtatgtggatggagtggaggtgcataatgccaagacaaagccccctgaggagcagtacaacagcactctcagagtggtctctgtcctcacagtcctgcaccaggactggctgaatggcaaggagtacaagtgcaaggtctccaacaaagccctcccagcccccattgagaaaaccatctccaaagccaaagggcagcccagagaaccacaggtgtacaccctgcccccatccagagatgagctgaccaagaaccaggtcagcctgacctgcctggtcaaaggcttctatccctctgacattgctgtggagtgggagagcaatgggcagcctgagaacaactacaagaccacacctcttgtgctggactctgatggctccttcttcctctacagcaagctcacagtggacaagagcaggtggcagcaggggaatgtcttctcatgctctgtgatgcatgaggctctgcacaaccactacacccagaagagcctctccctgtctccaggtaaaagaaagaggagagagggcagaggaagtcttctaacatgtggtgatgtggaggagaatcctggccctatggacatgagggtccctgctcagctcctggggctcctgctgctctggctctcaggtgccagatgtgatatccagatgacccagtcccctagctccctgtctgcctctgtgggagatagggtcaccatcacctgcagagccagtcaggatgtgaatactgctgtagcctggtatcaacagaaaccaggaaaagctcctaaactactgatttactctgcatccttcctctactctggagtcccttctaggttctctggatccagatctgggactgatttcactctgaccatcagcagtctgcagccagaagactttgcaacttattactgtcagcaacattatactactcctcccacttttggacagggtaccaaggtggagatcaaaagaactgtggctgcaccatctgtcttcatcttcccaccatctgatgagcagttgaaatctggaactgcctctgttgtgtgcctgctgaataacttctatcccagagaggccaaagtacagtggaaggtggataatgccctccaatcaggtaactcccaggagagtgtcacagagcaggacagcaaggacagcacctacagcctcagcagcaccctgactctgagcaaagcagactatgagaaacacaaagtctatgcctgtgaagtcacccatcagggcctgagctctcctgtcacaaagagcttcaacaggggagagtgttagtagtaactcgaggacggggtgaactacgcctgaggatccgatctttttccctctgccaaaaattatggggacatcatgaagccccttgagcatctgacttctggctaataaaggaaatttattttcattgcaatagtgtgttggaattttttgtgtctctcactcggcctaggtagataagtagcatggcgggttaatcattaactacaaggaacccctagtgatggagttggccactccctctctgcgcgctcgctcgctcactgaggccgggcgaccaaaggtcgcccgacgcccgggctttgcccgggcggcctcagtgagcgagcgagcgcgcag

SEQ ID NO: 6612 - protein, 9 aa, synthetic construct
  VARIANT 1: note = Any amino acid
  VARIANT 7: note = Any amino acid
  VARIANT 9: note = Any amino acid
XSGSPHXKX

SEQ ID NO: 6613 - protein, 9 aa, synthetic construct
GSGSPHSKA

SEQ ID NO: 6614 - protein, 9 aa, synthetic construct
  VARIANT 1: note = Any amino acid
  VARIANT 2: note = Any amino acid other than S
  VARIANT 3: note = Any amino acid other than G
  VARIANT 8: note = Any amino acid
  VARIANT 9: note = Any amino acid
XXXSPHKXX

SEQ ID NO: 6615 - protein, 9 aa, synthetic construct
GHDSPHKSG

SEQ ID NO: 6616 - protein, 4 aa, synthetic construct
SPHS

SEQ ID NO: 6617 - protein, 5 aa, synthetic construct
SPHSK

SEQ ID NO: 6618 - protein, 4 aa, synthetic construct
HDSP

SEQ ID NO: 6619 - protein, 5 aa, synthetic construct
HDSPH

SEQ ID NO: 6620 - protein, 5 aa, synthetic construct
SPHKS

SEQ ID NO: 6621 - protein, 5 aa, synthetic construct
SPHAR

SEQ ID NO: 6622 - protein, 5 aa, synthetic construct
SPHVK

SEQ ID NO: 6623 - protein, 5 aa, synthetic construct
SPHAS

SEQ ID NO: 6624 - protein, 5 aa, synthetic construct
SPHKK

SEQ ID NO: 6625 - protein, 5 aa, synthetic construct
SPHVR

SEQ ID NO: 6626 - protein, 5 aa, synthetic construct
SPHRK

SEQ ID NO: 6627 - protein, 5 aa, synthetic construct
SPHKT

SEQ ID NO: 6628 - protein, 5 aa, synthetic construct
SPHKF

SEQ ID NO: 6629 - protein, 5 aa, synthetic construct
SPHKI

SEQ ID NO: 6630 - protein, 5 aa, synthetic construct
SPHKL

SEQ ID NO: 6631 - protein, 5 aa, synthetic construct
SPHKY

SEQ ID NO: 6632 - protein, 5 aa, synthetic construct
SPHTR

SEQ ID NO: 6633 - protein, 5 aa, synthetic construct
SPHKR

SEQ ID NO: 6634 - protein, 5 aa, synthetic construct
SPHGA

SEQ ID NO: 6635 - protein, 5 aa, synthetic construct
SPHSR

SEQ ID NO: 6636 - protein, 5 aa, synthetic construct
SPHSL

SEQ ID NO: 6637 - protein, 5 aa, synthetic construct
SPHSS

SEQ ID NO: 6638 - protein, 5 aa, synthetic construct
SPHFL

SEQ ID NO: 6639 - protein, 5 aa, synthetic construct
SPHWK

SEQ ID NO: 6640 - protein, 5 aa, synthetic construct
SPHGK

SEQ ID NO: 6641 - protein, 5 aa, synthetic construct
SPHTK

SEQ ID NO: 6642 - protein, 5 aa, synthetic construct
SPHNK

SEQ ID NO: 6643 - protein, 5 aa, synthetic construct
SPHAK

SEQ ID NO: 6644 - protein, 5 aa, synthetic construct
SPHKH

SEQ ID NO: 6645 - protein, 5 aa, synthetic construct
SPHKM

SEQ ID NO: 6646 - protein, 5 aa, synthetic construct
SPHRS

SEQ ID NO: 6647 - protein, 6 aa, synthetic construct
SPHSKT

SEQ ID NO: 6648 - protein, 6 aa, synthetic construct
SPHSKG

SEQ ID NO: 6649 - protein, 6 aa, synthetic construct
SPHGKA

SEQ ID NO: 6650 - protein, 6 aa, synthetic construct
SPHNKA

SEQ ID NO: 6651 - protein, 6 aa, synthetic construct
SPHSKN

SEQ ID NO: 6652 - protein, 6 aa, synthetic construct
SPHAKA

SEQ ID NO: 6653 - protein, 6 aa, synthetic construct
SPHSKV

SEQ ID NO: 6654 - protein, 6 aa, synthetic construct
SPHKTG

SEQ ID NO: 6655 - protein, 6 aa, synthetic construct
SPHTKA

SEQ ID NO: 6656 - protein, 6 aa, synthetic construct
SPHKSL

SEQ ID NO: 6657 - protein, 6 aa, synthetic construct
SPHKSE

SEQ ID NO: 6658 - protein, 6 aa, synthetic construct
SPHKSV

SEQ ID NO: 6659 - protein, 6 aa, synthetic construct
SPHKSW

SEQ ID NO: 6660 - protein, 6 aa, synthetic construct
SPHKSN

SEQ ID NO: 6661 - protein, 6 aa, synthetic construct
SPHKHG

SEQ ID NO: 6662 - protein, 6 aa, synthetic construct
SPHKSQ

SEQ ID NO: 6663 - protein, 6 aa, synthetic construct
SPHKSK

SEQ ID NO: 6664 - protein, 6 aa, synthetic construct
SPHKLW

SEQ ID NO: 6665 - protein, 6 aa, synthetic construct
SPHWKG

SEQ ID NO: 6666 - protein, 6 aa, synthetic construct
SPHKMG

SEQ ID NO: 6667 - protein, 6 aa, synthetic construct
SPHKMA

SEQ ID NO: 6668 - protein, 5 aa, synthetic construct
SGSPH

SEQ ID NO: 6669 - protein, 5 aa, synthetic construct
QDSPH

SEQ ID NO: 6670 - protein, 5 aa, synthetic construct
RGSPH

SEQ ID NO: 6671 - protein, 5 aa, synthetic construct
SHSPH

SEQ ID NO: 6672 - protein, 5 aa, synthetic construct
QSSPH

SEQ ID NO: 6673 - protein, 5 aa, synthetic construct
DDSPH

SEQ ID NO: 6674 - protein, 5 aa, synthetic construct
HESPH

SEQ ID NO: 6675 - protein, 5 aa, synthetic construct
NYSPH

SEQ ID NO: 6676 - protein, 5 aa, synthetic construct
VGSPH

SEQ ID NO: 6677 - protein, 5 aa, synthetic construct
SCSPH

SEQ ID NO: 6678 - protein, 5 aa, synthetic construct
LLSPH

SEQ ID NO: 6679 - protein, 5 aa, synthetic construct
NGSPH

SEQ ID NO: 6680 - protein, 5 aa, synthetic construct
PGSPH

SEQ ID NO: 6681 - protein, 5 aa, synthetic construct
GGSPH

SEQ ID NO: 6682 - protein, 5 aa, synthetic construct
TGSPH

SEQ ID NO: 6683 - protein, 5 aa, synthetic construct
SVSPH

SEQ ID NO: 6684 - protein, 5 aa, synthetic construct
IGSPH

SEQ ID NO: 6685 - protein, 5 aa, synthetic construct
DGSPH

SEQ ID NO: 6686 - protein, 5 aa, synthetic construct
LGSPH

SEQ ID NO: 6687 - protein, 5 aa, synthetic construct
AGSPH

SEQ ID NO: 6688 - protein, 5 aa, synthetic construct
EGSPH

SEQ ID NO: 6689 - protein, 5 aa, synthetic construct
SASPH

SEQ ID NO: 6690 - protein, 5 aa, synthetic construct
YDSPH

SEQ ID NO: 6691 - protein, 5 aa, synthetic construct
HGSPH

SEQ ID NO: 6692 - protein, 5 aa, synthetic construct
RDSPH

SEQ ID NO: 6693 - protein, 5 aa, synthetic construct
NDSPH

SEQ ID NO: 6694 - protein, 5 aa, synthetic construct
PDSPH

SEQ ID NO: 6695 - protein, 5 aa, synthetic construct
MGSPH

SEQ ID NO: 6696 - protein, 5 aa, synthetic construct
QVSPH

SEQ ID NO: 6697 - protein, 5 aa, synthetic construct
HNSPH

SEQ ID NO: 6698 - protein, 5 aa, synthetic construct
HPSPH

SEQ ID NO: 6699 - protein, 5 aa, synthetic construct
HSSPH

SEQ ID NO: 6700 - protein, 6 aa, synthetic construct
GSGSPH

SEQ ID NO: 6701 - protein, 6 aa, synthetic construct
GHDSPH

SEQ ID NO: 6702 - protein, 6 aa, synthetic construct
GQDSPH

SEQ ID NO: 6703 - protein, 6 aa, synthetic construct
VSGSPH

SEQ ID NO: 6704 - protein, 6 aa, synthetic construct
CSGSPH

SEQ ID NO: 6705 - protein, 6 aa, synthetic construct
GRGSPH

SEQ ID NO: 6706 - protein, 6 aa, synthetic construct
CSHSPH

SEQ ID NO: 6707 - protein, 6 aa, synthetic construct
GQSSPH

SEQ ID NO: 6708 - protein, 6 aa, synthetic construct
GSHSPH

SEQ ID NO: 6709 - protein, 6 aa, synthetic construct
GDDSPH

SEQ ID NO: 6710 - protein, 6 aa, synthetic construct
GHESPH

SEQ ID NO: 6711 - protein, 6 aa, synthetic construct
GNYSPH

SEQ ID NO: 6712 - protein, 6 aa, synthetic construct
RVGSPH

SEQ ID NO: 6713 - protein, 6 aa, synthetic construct
GSCSPH

SEQ ID NO: 6714 - protein, 6 aa, synthetic construct
GLLSPH

SEQ ID NO: 6715 - protein, 6 aa, synthetic construct
MSGSPH

SEQ ID NO: 6716 - protein, 6 aa, synthetic construct
RNGSPH

SEQ ID NO: 6717 - protein, 6 aa, synthetic construct
TSGSPH

SEQ ID NO: 6718 - protein, 6 aa, synthetic construct
ISGSPH

SEQ ID NO: 6719 - protein, 6 aa, synthetic construct
GPGSPH

SEQ ID NO: 6720 - protein, 6 aa, synthetic construct
ESGSPH

SEQ ID NO: 6721 - protein, 6 aa, synthetic construct
SSGSPH

SEQ ID NO: 6722 - protein, 6 aa, synthetic construct
GNGSPH

SEQ ID NO: 6723 - protein, 6 aa, synthetic construct
ASGSPH

SEQ ID NO: 6724 - protein, 6 aa, synthetic construct
NSGSPH

SEQ ID NO: 6725 - protein, 6 aa, synthetic construct
LSGSPH

SEQ ID NO: 6726 - protein, 6 aa, synthetic construct
GGGSPH

SEQ ID NO: 6727 - protein, 6 aa, synthetic construct
KSGSPH

SEQ ID NO: 6728 - protein, 6 aa, synthetic construct
HSGSPH

SEQ ID NO: 6729 - protein, 6 aa, synthetic construct
GTGSPH

SEQ ID NO: 6730 - protein, 6 aa, synthetic construct
PSGSPH

SEQ ID NO: 6731 - protein, 6 aa, synthetic construct
GSVSPH

SEQ ID NO: 6732 - protein, 6 aa, synthetic construct
RSGSPH

SEQ ID NO: 6733 - protein, 6 aa, synthetic construct
GIGSPH

SEQ ID NO: 6734 - protein, 6 aa, synthetic construct
WSGSPH

SEQ ID NO: 6735 - protein, 6 aa, synthetic construct
DSGSPH

SEQ ID NO: 6736 - protein, 6 aa, synthetic construct
IDGSPH

SEQ ID NO: 6737 - protein, 6 aa, synthetic construct
GLGSPH

SEQ ID NO: 6738 - protein, 6 aa, synthetic construct
DAGSPH

SEQ ID NO: 6739 - protein, 6 aa, synthetic construct
DGGSPH

SEQ ID NO: 6740 - protein, 6 aa, synthetic construct
MEGSPH

SEQ ID NO: 6741 - protein, 6 aa, synthetic construct
ENGSPH

SEQ ID NO: 6742 - protein, 6 aa, synthetic construct
GSASPH

SEQ ID NO: 6743 - protein, 6 aa, synthetic construct
KNGSPH

SEQ ID NO: 6744 - protein, 6 aa, synthetic construct
KEGSPH

SEQ ID NO: 6745 - protein, 6 aa, synthetic construct
AIGSPH

SEQ ID NO: 6746 - protein, 6 aa, synthetic construct
GYDSPH

SEQ ID NO: 6747 - protein, 6 aa, synthetic construct
GHGSPH

SEQ ID NO: 6748 - protein, 6 aa, synthetic construct
GRDSPH

SEQ ID NO: 6749 - protein, 6 aa, synthetic construct
GNDSPH

SEQ ID NO: 6750 - protein, 6 aa, synthetic construct
GPDSPH

SEQ ID NO: 6751 - protein, 6 aa, synthetic construct
GMGSPH

SEQ ID NO: 6752 - protein, 6 aa, synthetic construct
GQVSPH

SEQ ID NO: 6753 - protein, 6 aa, synthetic construct
GHNSPH

SEQ ID NO: 6754 - protein, 6 aa, synthetic construct
GHPSPH

SEQ ID NO: 6755 - protein, 6 aa, synthetic construct
GHSSPH

SEQ ID NO: 6756 - protein, 7 aa, synthetic construct
SGSPHSK

SEQ ID NO: 6757 - protein, 7 aa, synthetic construct
HDSPHKS

SEQ ID NO: 6758 - protein, 7 aa, synthetic construct
SGSPHAR

SEQ ID NO: 6759 - protein, 7 aa, synthetic construct
SGSPHVK

SEQ ID NO: 6760 - protein, 7 aa, synthetic construct
QDSPHKS

SEQ ID NO: 6761 - protein, 7 aa, synthetic construct
SGSPHKK

SEQ ID NO: 6762 - protein, 7 aa, synthetic construct
SGSPHVR

SEQ ID NO: 6763 - protein, 7 aa, synthetic construct
SGSPHAS

SEQ ID NO: 6764 - protein, 7 aa, synthetic construct
SGSPHRK

SEQ ID NO: 6765 - protein, 7 aa, synthetic construct
SGSPHKT

SEQ ID NO: 6766 - protein, 7 aa, synthetic construct
SHSPHKS

SEQ ID NO: 6767 - protein, 7 aa, synthetic construct
QSSPHRS

SEQ ID NO: 6768 - protein, 7 aa, synthetic construct
RGSPHAS

SEQ ID NO: 6769 - protein, 7 aa, synthetic construct
RGSPHSK

SEQ ID NO: 6770 - protein, 7 aa, synthetic construct
SGSPHKF

SEQ ID NO: 6771 - protein, 7 aa, synthetic construct
SGSPHKI

SEQ ID NO: 6772 - protein, 7 aa, synthetic construct
SGSPHKL

SEQ ID NO: 6773 - protein, 7 aa, synthetic construct
SGSPHKY

SEQ ID NO: 6774 - protein, 7 aa, synthetic construct
SGSPHTR

SEQ ID NO: 6775 - protein, 7 aa, synthetic construct
SHSPHKR

SEQ ID NO: 6776 - protein, 7 aa, synthetic construct
SGSPHGA

SEQ ID NO: 6777 - protein, 7 aa, synthetic construct
HDSPHKR

SEQ ID NO: 6778 - protein, 7 aa, synthetic construct
DDSPHKS

SEQ ID NO: 6779 - protein, 7 aa, synthetic construct
HESPHKS

SEQ ID NO: 6780 - protein, 7 aa, synthetic construct
NYSPHKI

SEQ ID NO: 6781 - protein, 7 aa, synthetic construct
SGSPHSR

SEQ ID NO: 6782 - protein, 7 aa, synthetic construct
SGSPHSL

SEQ ID NO: 6783 - protein, 7 aa, synthetic construct
SGSPHSS

SEQ ID NO: 6784 - protein, 7 aa, synthetic construct
VGSPHSK

SEQ ID NO: 6785 - protein, 7 aa, synthetic construct
SCSPHRK

SEQ ID NO: 6786 - protein, 7 aa, synthetic construct
SGSPHFL

SEQ ID NO: 6787 - protein, 7 aa, synthetic construct
LLSPHWK

SEQ ID NO: 6788 - protein, 7 aa, synthetic construct
NGSPHSK

SEQ ID NO: 6789 - protein, 7 aa, synthetic construct
PGSPHSK

SEQ ID NO: 6790 - protein, 7 aa, synthetic construct
GGSPHSK

SEQ ID NO: 6791 - protein, 7 aa, synthetic construct
TGSPHSK

SEQ ID NO: 6792 - protein, 7 aa, synthetic construct
SVSPHGK

SEQ ID NO: 6793 - protein, 7 aa, synthetic construct
SGSPHTK

SEQ ID NO: 6794 - protein, 7 aa, synthetic construct
IGSPHSK

SEQ ID NO: 6795 - protein, 7 aa, synthetic construct
DGSPHSK

SEQ ID NO: 6796 - protein, 7 aa, synthetic construct
SGSPHNK

SEQ ID NO: 6797 - protein, 7 aa, synthetic construct
LGSPHSK

SEQ ID NO: 6798 - protein, 7 aa, synthetic construct
AGSPHSK

SEQ ID NO: 6799 - protein, 7 aa, synthetic construct
EGSPHSK

SEQ ID NO: 6800 - protein, 7 aa, synthetic construct
SASPHSK

SEQ ID NO: 6801 - protein, 7 aa, synthetic construct
SGSPHAK

SEQ ID NO: 6802 - protein, 7 aa, synthetic construct
HDSPHKI

SEQ ID NO: 6803 - protein, 7 aa, synthetic construct
YDSPHKS

SEQ ID NO: 6804 - protein, 7 aa, synthetic construct
HDSPHKT

SEQ ID NO: 6805 - protein, 7 aa, synthetic construct
RGSPHKR

SEQ ID NO: 6806 - protein, 7 aa, synthetic construct
HGSPHSK

SEQ ID NO: 6807 - protein, 7 aa, synthetic construct
RDSPHKS

SEQ ID NO: 6808 - protein, 7 aa, synthetic construct
NDSPHKS

SEQ ID NO: 6809 - protein, 7 aa, synthetic construct
QDSPHKI

SEQ ID NO: 6810 - protein, 7 aa, synthetic construct
PDSPHKI

SEQ ID NO: 6811 - protein, 7 aa, synthetic construct
PDSPHKS

SEQ ID NO: 6812 - protein, 7 aa, synthetic construct
MGSPHSK

SEQ ID NO: 6813 - protein, 7 aa, synthetic construct
HDSPHKH

SEQ ID NO: 6814 - protein, 7 aa, synthetic construct
QVSPHKS

SEQ ID NO: 6815 - protein, 7 aa, synthetic construct
HNSPHKS

SEQ ID NO: 6816 - protein, 7 aa, synthetic construct
NGSPHKR

SEQ ID NO: 6817 - protein, 7 aa, synthetic construct
HDSPHKY

SEQ ID NO: 6818 - protein, 7 aa, synthetic construct
NDSPHKI

SEQ ID NO: 6819 - protein, 7 aa, synthetic construct
HDSPHKL

SEQ ID NO: 6820 - protein, 7 aa, synthetic construct
HPSPHWK

SEQ ID NO: 6821 - protein, 7 aa, synthetic construct
HDSPHKM

SEQ ID NO: 6822 - protein, 7 aa, synthetic construct
HSSPHRS

SEQ ID NO: 6823 - protein, 9 aa, synthetic construct
GSGSPHARM

SEQ ID NO: 6824 - protein, 9 aa, synthetic construct
GSGSPHVKS

SEQ ID NO: 6825 - protein, 9 aa, synthetic construct
GQDSPHKSG

SEQ ID NO: 6826 - protein, 9 aa, synthetic construct
GSGSPHASR

SEQ ID NO: 6827 - protein, 9 aa, synthetic construct
GSGSPHVKI

SEQ ID NO: 6828 - protein, 9 aa, synthetic construct
GSGSPHKKN

SEQ ID NO: 6829 - protein, 9 aa, synthetic construct
GSGSPHVRM

SEQ ID NO: 6830 - protein, 9 aa, synthetic construct
VSGSPHSKA

SEQ ID NO: 6831 - protein, 9 aa, synthetic construct
CSGSPHSKA

SEQ ID NO: 6832 - protein, 9 aa, synthetic construct
GSGSPHRKA

SEQ ID NO: 6833 - protein, 9 aa, synthetic construct
CSGSPHKTS

SEQ ID NO: 6834 - protein, 9 aa, synthetic construct
CSHSPHKSG

SEQ ID NO: 6835 - protein, 9 aa, synthetic construct
GQSSPHRSG

SEQ ID NO: 6836 - protein, 9 aa, synthetic construct
GRGSPHASR

SEQ ID NO: 6837 - protein, 9 aa, synthetic construct
GRGSPHSKA

SEQ ID NO: 6838 - protein, 9 aa, synthetic construct
GSGSPHKFG

SEQ ID NO: 6839 - protein, 9 aa, synthetic construct
GSGSPHKIG

SEQ ID NO: 6840 - protein, 9 aa, synthetic construct
GSGSPHKLG

SEQ ID NO: 6841 - protein, 9 aa, synthetic construct
GSGSPHKTS

SEQ ID NO: 6842 - protein, 9 aa, synthetic construct
GSGSPHKTT

SEQ ID NO: 6843 - protein, 9 aa, synthetic construct
GSGSPHKTY

SEQ ID NO: 6844 - protein, 9 aa, synthetic construct
GSGSPHKYG

SEQ ID NO: 6845 - protein, 9 aa, synthetic construct
GSGSPHSKD

SEQ ID NO: 6846 - protein, 9 aa, synthetic construct
GSGSPHSKP

SEQ ID NO: 6847 - protein, 9 aa, synthetic construct
GSGSPHTRG

SEQ ID NO: 6848 - protein, 9 aa, synthetic construct
GSGSPHVRG

SEQ ID NO: 6849 - protein, 9 aa, synthetic construct
GSHSPHKRG

SEQ ID NO: 6850 - protein, 9 aa, synthetic construct
GSHSPHKSG

SEQ ID NO: 6851 - protein, 9 aa, synthetic construct
VSGSPHASR

SEQ ID NO: 6852 - protein, 9 aa, synthetic construct
VSGSPHGAR

SEQ ID NO: 6853 - protein, 9 aa, synthetic construct
VSGSPHKFG

SEQ ID NO: 6854 - protein, 9 aa, synthetic construct
GHDSPHKRG

SEQ ID NO: 6855 - protein, 9 aa, synthetic construct
GDDSPHKSG

SEQ ID NO: 6856 - protein, 9 aa, synthetic construct
GHESPHKSA

SEQ ID NO: 6857 - protein, 9 aa, synthetic construct
GHDSPHKSA

SEQ ID NO: 6858 - protein, 9 aa, synthetic construct
GNYSPHKIG

SEQ ID NO: 6859 - protein, 9 aa, synthetic construct
GHDSPHKSR

SEQ ID NO: 6860 - protein, 9 aa, synthetic construct
GSGSPHSKL

SEQ ID NO: 6861 - protein, 9 aa, synthetic construct
GSGSPHSRA

SEQ ID NO: 6862 - protein, 9 aa, synthetic construct
GSGSPHSKR

SEQ ID NO: 6863 - protein, 9 aa, synthetic construct
GSGSPHSLR

SEQ ID NO: 6864 - protein, 9 aa, synthetic construct
GSGSPHSRG

SEQ ID NO: 6865 - protein, 9 aa, synthetic construct
GSGSPHSSR

SEQ ID NO: 6866 - protein, 9 aa, synthetic construct
RVGSPHSKA

SEQ ID NO: 6867 - protein, 9 aa, synthetic construct
GSCSPHRKA

SEQ ID NO: 6868 - protein, 9 aa, synthetic construct
GSGSPHFLR

SEQ ID NO: 6869 - protein, 9 aa, synthetic construct
GSGSPHSKW

SEQ ID NO: 6870 - protein, 9 aa, synthetic construct
GSGSPHSKS

SEQ ID NO: 6871 - protein, 9 aa, synthetic construct
GLLSPHWKA

SEQ ID NO: 6872 - protein, 9 aa, synthetic construct
GSGSPHVRR

SEQ ID NO: 6873 - protein, 9 aa, synthetic construct
GSGSPHSKV

SEQ ID NO: 6874 - protein, 9 aa, synthetic construct
MSGSPHSKA

SEQ ID NO: 6875 - protein, 9 aa, synthetic construct
RNGSPHSKA

SEQ ID NO: 6876 - protein, 9 aa, synthetic construct
TSGSPHSKA

SEQ ID NO: 6877 - protein, 9 aa, synthetic construct
ISGSPHSKA

SEQ ID NO: 6878 - protein, 9 aa, synthetic construct
GPGSPHSKA

SEQ ID NO: 6879 - protein, 9 aa, synthetic construct
GSGSPHSKT

SEQ ID NO: 6880 - protein, 9 aa, synthetic construct
ESGSPHSKA

SEQ ID NO: 6881 - protein, 9 aa, synthetic construct
SSGSPHSKA

SEQ ID NO: 6882 - protein, 9 aa, synthetic construct
GNGSPHSKA

SEQ ID NO: 6883 - protein, 9 aa, synthetic construct
ASGSPHSKA

SEQ ID NO: 6884 - protein, 9 aa, synthetic construct
NSGSPHSKA

SEQ ID NO: 6885 - protein, 9 aa, synthetic construct
LSGSPHSKA

SEQ ID NO: 6886 - protein, 9 aa, synthetic construct
GGGSPHSKA

SEQ ID NO: 6887 - protein, 9 aa, synthetic construct
KSGSPHSKA

SEQ ID NO: 6888 - protein, 9 aa, synthetic construct
GGGSPHSKS

SEQ ID NO: 6889 - protein, 9 aa, synthetic construct
GSGSPHSKG

SEQ ID NO: 6890 - protein, 9 aa, synthetic construct
HSGSPHSKA

SEQ ID NO: 6891 - protein, 9 aa, synthetic construct
GTGSPHSKA

SEQ ID NO: 6892 - protein, 9 aa, synthetic construct
PSGSPHSKA

SEQ ID NO: 6893 - protein, 9 aa, synthetic construct
GSVSPHGKA

SEQ ID NO: 6894 - protein, 9 aa, synthetic construct
RSGSPHSKA

SEQ ID NO: 6895 - protein, 9 aa, synthetic construct
GSGSPHTKA

SEQ ID NO: 6896 - protein, 9 aa, synthetic construct
GIGSPHSKA

SEQ ID NO: 6897 - protein, 9 aa, synthetic construct
WSGSPHSKA

SEQ ID NO: 6898 - protein, 9 aa, synthetic construct
DSGSPHSKA

SEQ ID NO: 6899 - protein, 9 aa, synthetic construct
IDGSPHSKA

SEQ ID NO: 6900 - protein, 9 aa, synthetic construct
GSGSPHNKA

SEQ ID NO: 6901 - protein, 9 aa, synthetic construct
GLGSPHSKS

SEQ ID NO: 6902 - protein, 9 aa, synthetic construct
DAGSPHSKA

SEQ ID NO: 6903 - protein, 9 aa, synthetic construct
DGGSPHSKA

SEQ ID NO: 6904 - protein, 9 aa, synthetic construct
MEGSPHSKA

SEQ ID NO: 6905 - protein, 9 aa, synthetic construct
ENGSPHSKA

SEQ ID NO: 6906 - protein, 9 aa, synthetic construct
GSASPHSKA

SEQ ID NO: 6907 - protein, 9 aa, synthetic construct
GNGSPHSKS

SEQ ID NO: 6908 - protein, 9 aa, synthetic construct
KNGSPHSKA

SEQ ID NO: 6909 - protein, 9 aa, synthetic construct
KEGSPHSKA

SEQ ID NO: 6910 - protein, 9 aa, synthetic construct
AIGSPHSKA

SEQ ID NO: 6911 - protein, 9 aa, synthetic construct
GSGSPHSKN

SEQ ID NO: 6912 - protein, 9 aa, synthetic construct
GSGSPHAKA

SEQ ID NO: 6913 - protein, 9 aa, synthetic construct
GHDSPHKIG

SEQ ID NO: 6914 - protein, 9 aa, synthetic construct
GYDSPHKSG

SEQ ID NO: 6915 - protein, 9 aa, synthetic construct
GHESPHKSG

SEQ ID NO: 6916 - protein, 9 aa, synthetic construct
GHDSPHKTG

SEQ ID NO: 6917 - protein, 9 aa, synthetic construct
GRGSPHKRG

SEQ ID NO: 6918 - protein, 9 aa, synthetic construct
GHDSPHKSL

SEQ ID NO: 6919 - protein, 9 aa, synthetic construct
GHGSPHSKA

SEQ ID NO: 6920 - protein, 9 aa, synthetic construct
GHDSPHKSE

SEQ ID NO: 6921 - protein, 9 aa, synthetic construct
GRDSPHKSG

SEQ ID NO: 6922 - protein, 9 aa, synthetic construct
GNDSPHKSV

SEQ ID NO: 6923 - protein, 9 aa, synthetic construct
GQDSPHKIG

SEQ ID NO: 6924 - protein, 9 aa, synthetic construct
GHDSPHKSV

SEQ ID NO: 6925 - protein, 9 aa, synthetic construct
GPDSPHKIG

SEQ ID NO: 6926 - protein, 9 aa, synthetic construct
GPDSPHKSG

SEQ ID NO: 6927 - protein, 9 aa, synthetic construct
GHDSPHKSW

SEQ ID NO: 6928 - protein, 9 aa, synthetic construct
GHDSPHKSN

SEQ ID NO: 6929 - protein, 9 aa, synthetic construct
GMGSPHSKT

SEQ ID NO: 6930 - protein, 9 aa, synthetic construct
GHDSPHKHG

SEQ ID NO: 6931 - protein, 9 aa, synthetic construct
GQVSPHKSG

SEQ ID NO: 6932 - protein, 9 aa, synthetic construct
GDDSPHKSV

SEQ ID NO: 6933 - protein, 9 aa, synthetic construct
GHNSPHKSG

SEQ ID NO: 6934 - protein, 9 aa, synthetic construct
GNGSPHKRG

SEQ ID NO: 6935 - protein, 9 aa, synthetic construct
GHDSPHKYG

SEQ ID NO: 6936 - protein, 9 aa, synthetic construct
GHDSPHKSQ

SEQ ID NO: 6937 - protein, 9 aa, synthetic construct
GNDSPHKIG

SEQ ID NO: 6938 - protein, 9 aa, synthetic construct
GHDSPHKSK

SEQ ID NO: 6939 - protein, 9 aa, synthetic construct
GHDSPHKLW

SEQ ID NO: 6940 - protein, 9 aa, synthetic construct
GHPSPHWKG

SEQ ID NO: 6941 - protein, 9 aa, synthetic construct
GHDSPHKMG

SEQ ID NO: 6942 - protein, 9 aa, synthetic construct
GHDSPHKMA

SEQ ID NO: 6943 - protein, 9 aa, synthetic construct
GHSSPHRSG

SEQ ID NO: 6944 - protein, 8 aa, synthetic construct
SGSPHKYG

SEQ ID NO: 6945 - protein, 4 aa, synthetic construct
QNQQ

SEQ ID NO: 6946 - protein, 4 aa, synthetic construct
WNQQ

SEQ ID NO: 6947 - protein, 4 aa, synthetic construct
QYYV

SEQ ID NO: 6948 - protein, 4 aa, synthetic construct
RRQQ

SEQ ID NO: 6949 - protein, 4 aa, synthetic construct
GCGQ

SEQ ID NO: 6950 - protein, 4 aa, synthetic construct
LRQQ

SEQ ID NO: 6951 - protein, 4 aa, synthetic construct
RNQQ

SEQ ID NO: 6952 - protein, 4 aa, synthetic construct
VNQQ

SEQ ID NO: 6953 - protein, 4 aa, synthetic construct
FRLQ

SEQ ID NO: 6954 - protein, 4 aa, synthetic construct
FNQQ

SEQ ID NO: 6955 - protein, 4 aa, synthetic construct
LLQQ

SEQ ID NO: 6956 - protein, 4 aa, synthetic construct
SNQQ

SEQ ID NO: 6957 - protein, 4 aa, synthetic construct
RLQQ

SEQ ID NO: 6958 - protein, 4 aa, synthetic construct
LNQQ

SEQ ID NO: 6959 - protein, 4 aa, synthetic construct
QRKL

SEQ ID NO: 6960 - protein, 4 aa, synthetic construct
LRRQ

SEQ ID NO: 6961 - protein, 4 aa, synthetic construct
QRLR

SEQ ID NO: 6962 - protein, 4 aa, synthetic construct
QRRL

SEQ ID NO: 6963 - protein, 4 aa, synthetic construct
RRLQ

SEQ ID NO: 6964 - protein, 4 aa, synthetic construct
RLRQ

SEQ ID NO: 6965 - protein, 4 aa, synthetic construct
SKRQ

SEQ ID NO: 6966 - protein, 4 aa, synthetic construct
QLYR

SEQ ID NO: 6967 - protein, 4 aa, synthetic construct
QLTV

SEQ ID NO: 6968 - protein, 4 aa, synthetic construct
QNKQ

SEQ ID NO: 6969 - protein, 4 aa, synthetic construct
KNQQ

SEQ ID NO: 6970 - protein, 4 aa, synthetic construct
QKQQ

SEQ ID NO: 6971 - protein, 4 aa, synthetic construct
QTQQ

SEQ ID NO: 6972 - protein, 4 aa, synthetic construct
QNHQ

SEQ ID NO: 6973 - protein, 4 aa, synthetic construct
QHQQ

SEQ ID NO: 6974 - protein, 4 aa, synthetic construct
QNQH

SEQ ID NO: 6975 - protein, 4 aa, synthetic construct
QHRQ

SEQ ID NO: 6976 - protein, 4 aa, synthetic construct
LTQQ

SEQ ID NO: 6977 - protein, 4 aa, synthetic construct
QNQW

SEQ ID NO: 6978 - protein, 4 aa, synthetic construct
QNTH

SEQ ID NO: 6979 - protein, 4 aa, synthetic construct
RRRQ

SEQ ID NO: 6980 - protein, 4 aa, synthetic construct
QYQQ

SEQ ID NO: 6981 - protein, 4 aa, synthetic construct
QNDQ

SEQ ID NO: 6982 - protein, 4 aa, synthetic construct
QNRH

SEQ ID NO: 6983 - protein, 4 aa, synthetic construct
RDQQ

SEQ ID NO: 6984 - protein, 4 aa, synthetic construct
PNLQ

SEQ ID NO: 6985 - protein, 4 aa, synthetic construct
HVRQ

SEQ ID NO: 6986 - protein, 4 aa, synthetic construct
PNQH

SEQ ID NO: 6987 - protein, 4 aa, synthetic construct
HNQQ

SEQ ID NO: 6988 - protein, 4 aa, synthetic construct
QSQQ

SEQ ID NO: 6989 - protein, 4 aa, synthetic construct
QPAK

SEQ ID NO: 6990 - protein, 4 aa, synthetic construct
QNLA

SEQ ID NO: 6991 - protein, 4 aa, synthetic construct
QNQL

SEQ ID NO: 6992 - protein, 4 aa, synthetic construct
QGQQ

SEQ ID NO: 6993 - protein, 4 aa, synthetic construct
LNRQ

SEQ ID NO: 6994 - protein, 4 aa, synthetic construct
QNPP

SEQ ID NO: 6995 - protein, 4 aa, synthetic construct
QNLQ

SEQ ID NO: 6996 - protein, 4 aa, synthetic construct
QDQE

SEQ ID NO: 6997 - protein, 4 aa, synthetic construct
QDQQ

SEQ ID NO: 6998 - protein, 4 aa, synthetic construct
HWQQ

SEQ ID NO: 6999 - protein, 4 aa, synthetic construct
PNQQ

SEQ ID NO: 7000 - protein, 4 aa, synthetic construct
PEQQ

SEQ ID NO: 7001 - protein, 4 aa, synthetic construct
QRTM

SEQ ID NO: 7002 - protein, 4 aa, synthetic construct
LHQH

SEQ ID NO: 7003 - protein, 4 aa, synthetic construct
QHRI

SEQ ID NO: 7004 - protein, 4 aa, synthetic construct
QYIH

SEQ ID NO: 7005 - protein, 4 aa, synthetic construct
QKFE

SEQ ID NO: 7006 - protein, 4 aa, synthetic construct
QFPS

SEQ ID NO: 7007 - protein, 4 aa, synthetic construct
QNPL

SEQ ID NO: 7008 - protein, 4 aa, synthetic construct
QAIK

SEQ ID NO: 7009 - protein, 4 aa, synthetic construct
QNRQ

SEQ ID NO: 7010 - protein, 4 aa, synthetic construct
QYQH

SEQ ID NO: 7011 - protein, 4 aa, synthetic construct
QNPQ

SEQ ID NO: 7012 - protein, 4 aa, synthetic construct
QHQL

SEQ ID NO: 7013 - protein, 4 aa, synthetic construct
QSPP

SEQ ID NO: 7014 - protein, 4 aa, synthetic construct
QAKL

SEQ ID NO: 7015 - protein, 4 aa, synthetic construct
KSQQ

SEQ ID NO: 7016 - protein, 4 aa, synthetic construct
QDRP

SEQ ID NO: 7017 - protein, 4 aa, synthetic construct
QNLG

SEQ ID NO: 7018 - protein, 4 aa, synthetic construct
QAFH

SEQ ID NO: 7019 - protein, 4 aa, synthetic construct
QNAQ

SEQ ID NO: 7020 - protein, 4 aa, synthetic construct
HNQL

SEQ ID NO: 7021 - protein, 4 aa, synthetic construct
QKLN

SEQ ID NO: 7022 - protein, 4 aa, synthetic construct
QNVQ

SEQ ID NO: 7023 - protein, 4 aa, synthetic construct
QAQQ

SEQ ID NO: 7024 - protein, 4 aa, synthetic construct
QTPP

SEQ ID NO: 7025 - protein, 4 aa, synthetic construct
QPPA

SEQ ID NO: 7026 - protein, 4 aa, synthetic construct
QERP

SEQ ID NO: 7027 - protein, 4 aa, synthetic construct
QDLQ

SEQ ID NO: 7028 - protein, 4 aa, synthetic construct
QAMH

SEQ ID NO: 7029 - protein, 4 aa, synthetic construct
QHPS

SEQ ID NO: 7030 - protein, 4 aa, synthetic construct
PGLQ

SEQ ID NO: 7031 - protein, 4 aa, synthetic construct
QGIR

SEQ ID NO: 7032 - protein, 4 aa, synthetic construct
QAPA

SEQ ID NO: 7033 - protein, 4 aa, synthetic construct
QIPP

SEQ ID NO: 7034 - protein, 4 aa, synthetic construct
QTQL

SEQ ID NO: 7035 - protein, 4 aa, synthetic construct
QAPS

SEQ ID NO: 7036 - protein, 4 aa, synthetic construct
QNTY

SEQ ID NO: 7037 - protein, 4 aa, synthetic construct
QDKQ

SEQ ID NO: 7038 - protein, 4 aa, synthetic construct
QNHL

SEQ ID NO: 7039 - protein, 4 aa, synthetic construct
QIGM

SEQ ID NO: 7040 - protein, 4 aa, synthetic construct
LNKQ

SEQ ID NO: 7041 - protein, 4 aa, synthetic construct
PNQL

SEQ ID NO: 7042 - protein, 4 aa, synthetic construct
QLQQ

SEQ ID NO: 7043 - protein, 4 aa, synthetic construct
QRMS

SEQ ID NO: 7044 - protein, 4 aa, synthetic construct
QGIL

SEQ ID NO: 7045 - protein, 4 aa, synthetic construct
QDRQ

SEQ ID NO: 7046 - protein, 4 aa, synthetic construct
RDWQ

SEQ ID NO: 7047 - protein, 4 aa, synthetic construct
QERS

SEQ ID NO: 7048 - protein, 4 aa, synthetic construct
QNYQ

SEQ ID NO: 7049 - protein, 4 aa, synthetic construct
QRTC

SEQ ID NO: 7050 - protein, 4 aa, synthetic construct
QIGH

SEQ ID NO: 7051 - protein, 4 aa, synthetic construct
QGAI

SEQ ID NO: 7052 - protein, 4 aa, synthetic construct
QVPP

SEQ ID NO: 7053 - protein, 4 aa, synthetic construct
QVQQ

SEQ ID NO: 7054 - protein, 4 aa, synthetic construct
LMRQ

SEQ ID NO: 7055 - protein, 4 aa, synthetic construct
QYSV

SEQ ID NO: 7056 - protein, 4 aa, synthetic construct
QAIT

SEQ ID NO: 7057 - protein, 4 aa, synthetic construct
QKTL

SEQ ID NO: 7058 - protein, 4 aa, synthetic construct
QLHH

SEQ ID NO: 7059 - protein, 4 aa, synthetic construct
QNII

SEQ ID NO: 7060 - protein, 4 aa, synthetic construct
QGHH

SEQ ID NO: 7061 - protein, 4 aa, synthetic construct
QSKV

SEQ ID NO: 7062 - protein, 4 aa, synthetic construct
QLPS

SEQ ID NO: 7063 - protein, 4 aa, synthetic construct
IGKQ

SEQ ID NO: 7064 - protein, 4 aa, synthetic construct
QAIH

SEQ ID NO: 7065 - protein, 4 aa, synthetic construct
QHGL

SEQ ID NO: 7066 - protein, 4 aa, synthetic construct
QFMC

SEQ ID NO: 7067 - protein, 4 aa, synthetic construct
QNQM

SEQ ID NO: 7068 - protein, 4 aa, synthetic construct
QHLQ

SEQ ID NO: 7069 - protein, 4 aa, synthetic construct
QPAR

SEQ ID NO: 7070 - protein, 4 aa, synthetic construct
QSLQ

SEQ ID NO: 7071 - protein, 4 aa, synthetic construct
QSQL

SEQ ID NO: 7072 - protein, 4 aa, synthetic construct
HSQQ

SEQ ID NO: 7073 - protein, 4 aa, synthetic construct
QMPS

SEQ ID NO: 7074 - protein, 4 aa, synthetic construct
QGSL

SEQ ID NO: 7075 - protein, 4 aa, synthetic construct
QVPA

SEQ ID NO: 7076 - protein, 4 aa, synthetic construct
HYQQ

SEQ ID NO: 7077 - protein, 4 aa, synthetic construct
QVPS

SEQ ID NO: 7078 - protein, 4 aa, synthetic construct
RGEQ

SEQ ID NO: 7079 - protein, 4 aa, synthetic construct
PGQQ

SEQ ID NO: 7080 - protein, 4 aa, synthetic construct
LEQQ

SEQ ID NO: 7081 - protein, 4 aa, synthetic construct
QNQS

SEQ ID NO: 7082 - protein, 4 aa, synthetic construct
QKVI

SEQ ID NO: 7083 - protein, 4 aa, synthetic construct
QNND

SEQ ID NO: 7084 - protein, 4 aa, synthetic construct
QSVH

SEQ ID NO: 7085 - protein, 4 aa, synthetic construct
QPLG

SEQ ID NO: 7086 - protein, 4 aa, synthetic construct
HNQE

SEQ ID NO: 7087 - protein, 4 aa, synthetic construct
QIQQ

SEQ ID NO: 7088 - protein, 4 aa, synthetic construct
QVRN

SEQ ID NO: 7089 - protein, 4 aa, synthetic construct
PSNQ

SEQ ID NO: 7090 - protein, 4 aa, synthetic construct
QVGH

SEQ ID NO: 7091 - protein, 4 aa, synthetic construct
QRDI

SEQ ID NO: 7092 - protein, 4 aa, synthetic construct
QMPN

SEQ ID NO: 7093 - protein, 4 aa, synthetic construct
RGLQ

SEQ ID NO: 7094 - protein, 4 aa, synthetic construct
PSLQ

SEQ ID NO: 7095 - protein, 4 aa, synthetic construct
QRDQ

SEQ ID NO: 7096 - protein, 4 aa, synthetic construct
QAKG

SEQ ID NO: 7097 - protein, 4 aa, synthetic construct
QSAH

SEQ ID NO: 7098 - protein, 4 aa, synthetic construct
QSTM

SEQ ID NO: 7099 - protein, 4 aa, synthetic construct
QREM

SEQ ID NO: 7100 - protein, 4 aa, synthetic construct
QYRA

SEQ ID NO: 7101 - protein, 4 aa, synthetic construct
QRQQ

SEQ ID NO: 7102 - protein, 4 aa, synthetic construct
QWQQ

SEQ ID NO: 7103 - protein, 4 aa, synthetic construct
QRMN

SEQ ID NO: 7104 - protein, 4 aa, synthetic construct
GDSQ

SEQ ID NO: 7105 - protein, 4 aa, synthetic construct
QKIS

SEQ ID NO: 7106 - protein, 4 aa, synthetic construct
PSMQ

SEQ ID NO: 7107 - protein, 4 aa, synthetic construct
SPRQ

SEQ ID NO: 7108 - protein, 4 aa, synthetic construct
MEQQ

SEQ ID NO: 7109 - protein, 4 aa, synthetic construct
QYQN

SEQ ID NO: 7110 - protein, 4 aa, synthetic construct
QIRQ

SEQ ID NO: 7111 - protein, 4 aa, synthetic construct
QSVQ

SEQ ID NO: 7112 - protein, 4 aa, synthetic construct
RSQQ

SEQ ID NO: 7113 - protein, 4 aa, synthetic construct
QNKL

SEQ ID NO: 7114 - protein, 4 aa, synthetic construct
QIQH

SEQ ID NO: 7115 - protein, 4 aa, synthetic construct
PRQQ

SEQ ID NO: 7116 - protein, 4 aa, synthetic construct
HTQQ

SEQ ID NO: 7117 - protein, 4 aa, synthetic construct
QRQH

SEQ ID NO: 7118 - protein, 4 aa, synthetic construct
RNQE

SEQ ID NO: 7119 - protein, 4 aa, synthetic construct
QSKQ

SEQ ID NO: 7120 - protein, 4 aa, synthetic construct
QNQP

SEQ ID NO: 7121 - protein, 4 aa, synthetic construct
QSPQ

SEQ ID NO: 7122 - protein, 4 aa, synthetic construct
QTRQ

SEQ ID NO: 7123 - protein, 4 aa, synthetic construct
QNLH

SEQ ID NO: 7124 - protein, 4 aa, synthetic construct
QNQE

SEQ ID NO: 7125 - protein, 4 aa, synthetic construct
LNQP

SEQ ID NO: 7126 - protein, 4 aa, synthetic construct
QNQD

SEQ ID NO: 7127 - protein, 4 aa, synthetic construct
QNLL

SEQ ID NO: 7128 - protein, 4 aa, synthetic construct
QLVI

SEQ ID NO: 7129 - protein, 4 aa, synthetic construct
RTQE

SEQ ID NO: 7130 - protein, 4 aa, synthetic construct
QTHQ

SEQ ID NO: 7131 - protein, 4 aa, synthetic construct
QDQH

SEQ ID NO: 7132 - protein, 4 aa, synthetic construct
QSQH

SEQ ID NO: 7133 - protein, 4 aa, synthetic construct
VRQQ

SEQ ID NO: 7134 - protein, 4 aa, synthetic construct
AWQQ

SEQ ID NO: 7135 - protein, 4 aa, synthetic construct
QSVP

SEQ ID NO: 7136 - protein, 4 aa, synthetic construct
QNIQ

SEQ ID NO: 7137 - protein, 4 aa, synthetic construct
LDQQ

SEQ ID NO: 7138 - protein, 4 aa, synthetic construct
PDQQ

SEQ ID NO: 7139 - protein, 4 aa, synthetic construct
ESQQ

SEQ ID NO: 7140 - protein, 4 aa, synthetic construct
QRQL

SEQ ID NO: 7141 - protein, 4 aa, synthetic construct
QIIV

SEQ ID NO: 7142 - protein, 4 aa, synthetic construct
QKQS

SEQ ID NO: 7143 - protein, 4 aa, synthetic construct
QSHQ

SEQ ID NO: 7144 - protein, 4 aa, synthetic construct
QFVV

SEQ ID NO: 7145 - protein, 4 aa, synthetic construct
QSQP

SEQ ID NO: 7146 - protein, 4 aa, synthetic construct
QNEQ

SEQ ID NO: 7147 - protein, 4 aa, synthetic construct
INQQ

SEQ ID NO: 7148 - protein, 4 aa, synthetic construct
RNRQ

SEQ ID NO: 7149 - protein, 4 aa, synthetic construct
RDQK

SEQ ID NO: 7150 - protein, 4 aa, synthetic construct
QWKR

SEQ ID NO: 7151 - protein, 4 aa, synthetic construct
ENRQ

SEQ ID NO: 7152 - protein, 4 aa, synthetic construct
QTQP

SEQ ID NO: 7153 - protein, 4 aa, synthetic construct
QKQL

SEQ ID NO: 7154 - protein, 4 aa, synthetic construct
RNQL

SEQ ID NO: 7155 - protein, 4 aa, synthetic construct
ISIQ

SEQ ID NO: 7156 - protein, 4 aa, synthetic construct
QTVC

SEQ ID NO: 7157 - protein, 4 aa, synthetic construct
QQIM

SEQ ID NO: 7158 - protein, 4 aa, synthetic construct
LNHQ

SEQ ID NO: 7159 - protein, 4 aa, synthetic construct
QNQA

SEQ ID NO: 7160 - protein, 4 aa, synthetic construct
QMIH

SEQ ID NO: 7161 - protein, 4 aa, synthetic construct
RNHQ

SEQ ID NO: 7162 - protein, 4 aa, synthetic construct
QKMN

SEQ ID NO: 7163 - protein, 5 aa, synthetic construct
QNQQT

SEQ ID NO: 7164 - protein, 5 aa, synthetic construct
QNRHT

SEQ ID NO: 7165 - protein, 5 aa, synthetic construct
RDQQT

SEQ ID NO: 7166 - protein, 5 aa, synthetic construct
PNLQT

SEQ ID NO: 7167 - protein, 5 aa, synthetic construct
HVRQT

SEQ ID NO: 7168 - protein, 5 aa, synthetic construct
PNQHT

SEQ ID NO: 7169 - protein, 5 aa, synthetic construct
QSQQT

SEQ ID NO: 7170 - protein, 5 aa, synthetic construct
QNQQI

SEQ ID NO: 7171 - protein, 5 aa, synthetic construct
QPAKT

SEQ ID NO: 7172 - protein, 5 aa, synthetic construct
QTQQN

SEQ ID NO: 7173 - protein, 5 aa, synthetic construct
QNLAT

SEQ ID NO: 7174 - protein, 5 aa, synthetic construct
QNQLT

SEQ ID NO: 7175 - protein, 5 aa, synthetic construct
QGQQT

SEQ ID NO: 7176 - protein, 5 aa, synthetic construct
LNRQS

SEQ ID NO: 7177 - protein, 5 aa, synthetic construct
HNQQT

SEQ ID NO: 7178 - protein, 5 aa, synthetic construct
QNPPT

SEQ ID NO: 7179 - protein, 5 aa, synthetic construct
QNLQT

SEQ ID NO: 7180 - protein, 5 aa, synthetic construct
QYQQT

SEQ ID NO: 7181 - protein, 5 aa, synthetic construct
QDQET

SEQ ID NO: 7182 - protein, 5 aa, synthetic construct
QNHQT

SEQ ID NO: 7183 - protein, 5 aa, synthetic construct
QDQQT

SEQ ID NO: 7184 - protein, 5 aa, synthetic construct
HWQQT

SEQ ID NO: 7185 - protein, 5 aa, synthetic construct
PNQQT

SEQ ID NO: 7186 - protein, 5 aa, synthetic construct
QNQLI

SEQ ID NO: 7187 - protein, 5 aa, synthetic construct
PEQQT

SEQ ID NO: 7188 - protein, 5 aa, synthetic construct
QRTMT

SEQ ID NO: 7189 - protein, 5 aa, synthetic construct
QNQQH

SEQ ID NO: 7190 - protein, 5 aa, synthetic construct
LHQHT

SEQ ID NO: 7191 - protein, 5 aa, synthetic construct
QHRIT

SEQ ID NO: 7192 - protein, 5 aa, synthetic construct
QYIHT

SEQ ID NO: 7193 - protein, 5 aa, synthetic construct
QKFET

SEQ ID NO: 7194 - protein, 5 aa, synthetic construct
QFPST

SEQ ID NO: 7195 - protein, 5 aa, synthetic construct
HNQQR

SEQ ID NO: 7196 - protein, 5 aa, synthetic construct
QAIKT

SEQ ID NO: 7197 - protein, 5 aa, synthetic construct
QNRQT

SEQ ID NO: 7198 - protein, 5 aa, synthetic construct
QYQHT

SEQ ID NO: 7199 - protein, 5 aa, synthetic construct
QNPQS

SEQ ID NO: 7200 - protein, 5 aa, synthetic construct
QHQLT

SEQ ID NO: 7201 - protein, 5 aa, synthetic construct
QSPPT

SEQ ID NO: 7202 - protein, 5 aa, synthetic construct
QAKLT

SEQ ID NO: 7203 - protein, 5 aa, synthetic construct
KSQQT

SEQ ID NO: 7204 - protein, 5 aa, synthetic construct
QDRPT

SEQ ID NO: 7205 - protein, 5 aa, synthetic construct
QSQQL

SEQ ID NO: 7206 - protein, 5 aa, synthetic construct
QAFHT

SEQ ID NO: 7207 - protein, 5 aa, synthetic construct
QKQQD

SEQ ID NO: 7208 - protein, 5 aa, synthetic construct
QNAQT

SEQ ID NO: 7209 - protein, 5 aa, synthetic construct
HNQLT

SEQ ID NO: 7210 - protein, 5 aa, synthetic construct
QNQQY

SEQ ID NO: 7211 - protein, 5 aa, synthetic construct
QKLNT

SEQ ID NO: 7212 - protein, 5 aa, synthetic construct
QNVQT

SEQ ID NO: 7213 - protein, 5 aa, synthetic construct
QAQQT

SEQ ID NO: 7214 - protein, 5 aa, synthetic construct
QNLQA

SEQ ID NO: 7215 - protein, 5 aa, synthetic construct
QTPPT

SEQ ID NO: 7216 - protein, 5 aa, synthetic construct
QYQHA

SEQ ID NO: 7217 - protein, 5 aa, synthetic construct
QGQQA

SEQ ID NO: 7218 - protein, 5 aa, synthetic construct
QPPAT

SEQ ID NO: 7219 - protein, 5 aa, synthetic construct
QERPT

SEQ ID NO: 7220 - protein, 5 aa, synthetic construct
QDLQT

SEQ ID NO: 7221 - protein, 5 aa, synthetic construct
QAMHT

SEQ ID NO: 7222 - protein, 5 aa, synthetic construct
LNQQT

SEQ ID NO: 7223 - protein, 5 aa, synthetic construct
QHPST

SEQ ID NO: 7224 - protein, 5 aa, synthetic construct
PGLQT

SEQ ID NO: 7225 - protein, 5 aa, synthetic construct
QGIRT

SEQ ID NO: 7226 - protein, 5 aa, synthetic construct
QAPAT

SEQ ID NO: 7227 - protein, 5 aa, synthetic construct
QSQQI

SEQ ID NO: 7228 - protein, 5 aa, synthetic construct
QIPPT

SEQ ID NO: 7229 - protein, 5 aa, synthetic construct
QTQLT

SEQ ID NO: 7230 - protein, 5 aa, synthetic construct
QAPST

SEQ ID NO: 7231 - protein, 5 aa, synthetic construct
QNTYA

SEQ ID NO: 7232 - protein, 5 aa, synthetic construct
QNQHI

SEQ ID NO: 7233 - protein, 5 aa, synthetic construct
QNHLT

SEQ ID NO: 7234 - protein, 5 aa, synthetic construct
QIGMT

SEQ ID NO: 7235 - protein, 5 aa, synthetic construct
LNKQT

SEQ ID NO: 7236 - protein, 5 aa, synthetic construct
QLQQT

SEQ ID NO: 7237 - protein, 5 aa, synthetic construct
QRMST

SEQ ID NO: 7238 - protein, 5 aa, synthetic construct
QGILT

SEQ ID NO: 7239 - protein, 5 aa, synthetic construct
QDRQT

SEQ ID NO: 7240 - protein, 5 aa, synthetic construct
RDWQT

SEQ ID NO: 7241 - protein, 5 aa, synthetic construct
QNTHD

SEQ ID NO: 7242 - protein, 5 aa, synthetic construct
PNLQI

SEQ ID NO: 7243 - protein, 5 aa, synthetic construct
QERST

SEQ ID NO: 7244 - protein, 5 aa, synthetic construct
QNYQT

SEQ ID NO: 7245 - protein, 5 aa, synthetic construct
QRTCT

SEQ ID NO: 7246 - protein, 5 aa, synthetic construct
QIGHT

SEQ ID NO: 7247 - protein, 5 aa, synthetic construct
QGAIT

SEQ ID NO: 7248 - protein, 5 aa, synthetic construct
QVPPT

SEQ ID NO: 7249 - protein, 5 aa, synthetic construct
QVQQI

SEQ ID NO: 7250 - protein, 5 aa, synthetic construct
LMRQT

SEQ ID NO: 7251 - protein, 5 aa, synthetic construct
QYSVT

SEQ ID NO: 7252 - protein, 5 aa, synthetic construct
QAITT

SEQ ID NO: 7253 - protein, 5 aa, synthetic construct
QKTLT

SEQ ID NO: 7254 - protein, 5 aa, synthetic construct
QNQWT

SEQ ID NO: 7255 - protein, 5 aa, synthetic construct
QLHHT

SEQ ID NO: 7256 - protein, 5 aa, synthetic construct
QNIII

SEQ ID NO: 7257 - protein, 5 aa, synthetic construct
QGHHT

SEQ ID NO: 7258 - protein, 5 aa, synthetic construct
QSKVT

SEQ ID NO: 7259 - protein, 5 aa, synthetic construct
QLPST

SEQ ID NO: 7260 - protein, 5 aa, synthetic construct
IGKQT

SEQ ID NO: 7261 - protein, 5 aa, synthetic construct
QAIHT

SEQ ID NO: 7262 - protein, 5 aa, synthetic construct
QHGLT

SEQ ID NO: 7263 - protein, 5 aa, synthetic construct
QFMCT

SEQ ID NO: 7264 - protein, 5 aa, synthetic construct
QHLQT

SEQ ID NO: 7265 - protein, 5 aa, synthetic construct
QNHQN

SEQ ID NO: 7266 - protein, 5 aa, synthetic construct
QPART

SEQ ID NO: 7267 - protein, 5 aa, synthetic construct
QSLQT

SEQ ID NO: 7268 - protein, 5 aa, synthetic construct
QSQLT

SEQ ID NO: 7269 - protein, 5 aa, synthetic construct
QDRQS

SEQ ID NO: 7270 - protein, 5 aa, synthetic construct
QMPST

SEQ ID NO: 7271 - protein, 5 aa, synthetic construct
QGSLT

SEQ ID NO: 7272 - protein, 5 aa, synthetic construct
QVPAT

SEQ ID NO: 7273 - protein, 5 aa, synthetic construct
QDKQT

SEQ ID NO: 7274 - protein, 5 aa, synthetic construct
HYQQT

SEQ ID NO: 7275 - protein, 5 aa, synthetic construct
QVPST

SEQ ID NO: 7276 - protein, 5 aa, synthetic construct
RGEQT

SEQ ID NO: 7277 - protein, 5 aa, synthetic construct
PGQQT

SEQ ID NO: 7278 - protein, 5 aa, synthetic construct
QSLQI

SEQ ID NO: 7279 - protein, 5 aa, synthetic construct
LEQQT

SEQ ID NO: 7280 - protein, 5 aa, synthetic construct
QNQST

SEQ ID NO: 7281 - protein, 5 aa, synthetic construct
QKVIT

SEQ ID NO: 7282 - protein, 5 aa, synthetic construct
QNNDQ

SEQ ID NO: 7283 - protein, 5 aa, synthetic construct
QSVHT

SEQ ID NO: 7284 - protein, 5 aa, synthetic construct
QPLGT

SEQ ID NO: 7285 - protein, 5 aa, synthetic construct
HNQET

SEQ ID NO: 7286 - protein, 5 aa, synthetic construct
QNLQI

SEQ ID NO: 7287 - protein, 5 aa, synthetic construct
QIQQT

SEQ ID NO: 7288 - protein, 5 aa, synthetic construct
QVRNT

SEQ ID NO: 7289 - protein, 5 aa, synthetic construct
PSNQT

SEQ ID NO: 7290 - protein, 5 aa, synthetic construct
QVGHT

SEQ ID NO: 7291 - protein, 5 aa, synthetic construct
QRDIT

SEQ ID NO: 7292 - protein, 5 aa, synthetic construct
QMPNT

SEQ ID NO: 7293 - protein, 5 aa, synthetic construct
RGLQT

SEQ ID NO: 7294 - protein, 5 aa, synthetic construct
QKQQT

SEQ ID NO: 7295 - protein, 5 aa, synthetic construct
PSLQT

SEQ ID NO: 7296 - protein, 5 aa, synthetic construct
QRDQT

SEQ ID NO: 7297 - protein, 5 aa, synthetic construct
QAKGT

SEQ ID NO: 7298 - protein, 5 aa, synthetic construct
QSAHT

SEQ ID NO: 7299 - protein, 5 aa, synthetic construct
QSTMT

SEQ ID NO: 7300 - protein, 5 aa, synthetic construct
QREMT

SEQ ID NO: 7301 - protein, 5 aa, synthetic construct
QYRAT

SEQ ID NO: 7302 - protein, 5 aa, synthetic construct
QWQQT

SEQ ID NO: 7303 - protein, 5 aa, synthetic construct
QRMNT

SEQ ID NO: 7304 - protein, 5 aa, synthetic construct
GDSQT

SEQ ID NO: 7305 - protein, 5 aa, synthetic construct
QKIST

SEQ ID NO: 7306 - protein, 5 aa, synthetic construct
PSMQT

SEQ ID NO: 7307 - protein, 5 aa, synthetic construct
SPRQT

SEQ ID NO: 7308 - protein, 5 aa, synthetic construct
MEQQT

SEQ ID NO: 7309 - protein, 5 aa, synthetic construct
QYQNT

SEQ ID NO: 7310 - protein, 5 aa, synthetic construct
QHQQT

SEQ ID NO: 7311 - protein, 5 aa, synthetic construct
INQQT

SEQ ID NO: 7312 - protein, 5 aa, synthetic construct
PNQQH

SEQ ID NO: 7313 - protein, 5 aa, synthetic construct
ENRQT

SEQ ID NO: 7314 - protein, 5 aa, synthetic construct
QTQQA

SEQ ID NO: 7315 - protein, 5 aa, synthetic construct
QNQAT

SEQ ID NO: 7316 - protein, 4 aa, synthetic construct
KTII

SEQ ID NO: 7317 - protein, 4 aa, synthetic construct
KTFP

SEQ ID NO: 7318 - protein, 4 aa, synthetic construct
KTEK

SEQ ID NO: 7319 - protein, 4 aa, synthetic construct
KTVN

SEQ ID NO: 7320 - protein, 4 aa, synthetic construct
KTFN

SEQ ID NO: 7321 - protein, 4 aa, synthetic construct
KTIN

SEQ ID NO: 7322 - protein, 4 aa, synthetic construct
TTIN

SEQ ID NO: 7323 - protein, 4 aa, synthetic construct
KSIN

SEQ ID NO: 7324 - protein, 4 aa, synthetic construct
KTER

SEQ ID NO: 7325 - protein, 4 aa, synthetic construct
KELH

SEQ ID NO: 7326 - protein, 4 aa, synthetic construct
KAIN

SEQ ID NO: 7327 - protein, 4 aa, synthetic construct
KTDN

SEQ ID NO: 7328 - protein, 4 aa, synthetic construct
KTFH

SEQ ID NO: 7329 - protein, 4 aa, synthetic construct
KTSN

SEQ ID NO: 7330 - protein, 4 aa, synthetic construct
ETIN

SEQ ID NO: 7331 - protein, 4 aa, synthetic construct
NTIN

SEQ ID NO: 7332 - protein, 4 aa, synthetic construct
KTEN

SEQ ID NO: 7333 - protein, 4 aa, synthetic construct
KTSS

SEQ ID NO: 7334 - protein, 4 aa, synthetic construct
KTCN

SEQ ID NO: 7335 - protein, 4 aa, synthetic construct
KTEH

SEQ ID NO: 7336 - protein, 4 aa, synthetic construct
KAEM

SEQ ID NO: 7337 - protein, 4 aa, synthetic construct
KATN

SEQ ID NO: 7338 - protein, 4 aa, synthetic construct
KAIK

SEQ ID NO: 7339 - protein, 4 aa, synthetic construct
KTDK

SEQ ID NO: 7340 - protein, 4 aa, synthetic construct
KTFK

SEQ ID NO: 7341 - protein, 4 aa, synthetic construct
KSDQ

SEQ ID NO: 7342 - protein, 4 aa, synthetic construct
KTEI

SEQ ID NO: 7343 - protein, 4 aa, synthetic construct
KTID

SEQ ID NO: 7344 - protein, 4 aa, synthetic construct
KNTN

SEQ ID NO: 7345 - protein, 4 aa, synthetic construct
KTET

SEQ ID NO: 7346 - protein, 4 aa, synthetic construct
KTEL

SEQ ID NO: 7347 - protein, 4 aa, synthetic construct
KNIN

SEQ ID NO: 7348 - protein, 4 aa, synthetic construct
KTEA

SEQ ID NO: 7349 - protein, 4 aa, synthetic construct
KTAN

SEQ ID NO: 7350 - protein, 4 aa, synthetic construct
NTIY

SEQ ID NO: 7351 - protein, 4 aa, synthetic construct
KTFS

SEQ ID NO: 7352 - protein, 4 aa, synthetic construct
KTES

SEQ ID NO: 7353 - protein, 4 aa, synthetic construct
KTTN

SEQ ID NO: 7354 - protein, 4 aa, synthetic construct
KTED

SEQ ID NO: 7355 - protein, 4 aa, synthetic construct
KTNN

SEQ ID NO: 7356 - protein, 4 aa, synthetic construct
KEVH

SEQ ID NO: 7357 - protein, 4 aa, synthetic construct
KTIS

SEQ ID NO: 7358 - protein, 4 aa, synthetic construct
KTVR

SEQ ID NO: 7359 - protein, 4 aa, synthetic construct
KTDR

SEQ ID NO: 7360 - protein, 4 aa, synthetic construct
ETIK

SEQ ID NO: 7361 - protein, 4 aa, synthetic construct
KNHI

SEQ ID NO: 7362 - protein, 4 aa, synthetic construct
KESD

SEQ ID NO: 7363 - protein, 4 aa, synthetic construct
KTIK

SEQ ID NO: 7364 - protein, 4 aa, synthetic construct
KTDL

SEQ ID NO: 7365 - protein, 4 aa, synthetic construct
KTVP

SEQ ID NO: 7366 - protein, 4 aa, synthetic construct
KTVI

SEQ ID NO: 7367 - protein, 4 aa, synthetic construct
KAEH

SEQ ID NO: 7368 - protein, 4 aa, synthetic construct
KNCL

SEQ ID NO: 7369 - protein, 4 aa, synthetic construct
KTVK

SEQ ID NO: 7370 - protein, 4 aa, synthetic construct
KNAD

SEQ ID NO: 7371 - protein, 4 aa, synthetic construct
KTIT

SEQ ID NO: 7372 - protein, 4 aa, synthetic construct
KNCV

SEQ ID NO: 7373 - protein, 4 aa, synthetic construct
KNAL

SEQ ID NO: 7374 - protein, 4 aa, synthetic construct
KVIN

SEQ ID NO: 7375 - protein, 4 aa, synthetic construct
KTEF

SEQ ID NO: 7376 - protein, 4 aa, synthetic construct
KTRE

SEQ ID NO: 7377 - protein, 4 aa, synthetic construct
KQGE

SEQ ID NO: 7378 - protein, 4 aa, synthetic construct
KSEK

SEQ ID NO: 7379 - protein, 4 aa, synthetic construct
KNVN

SEQ ID NO: 7380 - protein, 4 aa, synthetic construct
KGGE

SEQ ID NO: 7381 - protein, 4 aa, synthetic construct
KEFV

SEQ ID NO: 7382 - protein, 4 aa, synthetic construct
KSDK

SEQ ID NO: 7383 - protein, 4 aa, synthetic construct
KTEQ

SEQ ID NO: 7384 - protein, 4 aa, synthetic construct
KEVQ

SEQ ID NO: 7385 - protein, 4 aa, synthetic construct
KTEY

SEQ ID NO: 7386 - protein, 4 aa, synthetic construct
KNCW

SEQ ID NO: 7387 - protein, 4 aa, synthetic construct
KTDV

SEQ ID NO: 7388 - protein, 4 aa, synthetic construct
KSDI

SEQ ID NO: 7389 - protein, 4 aa, synthetic construct
KNSI

SEQ ID NO: 7390 - protein, 4 aa, synthetic construct
KNSL

SEQ ID NO: 7391 - protein, 4 aa, synthetic construct
KEVV

SEQ ID NO: 7392 - protein, 4 aa, synthetic construct
KTEP

SEQ ID NO: 7393 - protein, 4 aa, synthetic construct
KSEL

SEQ ID NO: 7394 - protein, 4 aa, synthetic construct
KTWQ

SEQ ID NO: 7395 - protein, 4 aa, synthetic construct
KTEV

SEQ ID NO: 7396 - protein, 4 aa, synthetic construct
KAVN

SEQ ID NO: 7397 - protein, 4 aa, synthetic construct
KGVL

SEQ ID NO: 7398 - protein, 4 aa, synthetic construct
KTEG

SEQ ID NO: 7399 - protein, 4 aa, synthetic construct
KTRD

SEQ ID NO: 7400 - protein, 4 aa, synthetic construct
KTGN

SEQ ID NO: 7401 - protein, 4 aa, synthetic construct
KNAI

SEQ ID NO: 7402 - protein, 4 aa, synthetic construct
KAEN

SEQ ID NO: 7403 - protein, 4 aa, synthetic construct
KAET

SEQ ID NO: 7404 - protein, 4 aa, synthetic construct
KTVH

SEQ ID NO: 7405 - protein, 4 aa, synthetic construct
KETA

SEQ ID NO: 7406 - protein, 4 aa, synthetic construct
KNNL

SEQ ID NO: 7407 - protein, 4 aa, synthetic construct
EAIN

SEQ ID NO: 7408 - protein, 4 aa, synthetic construct
KSLN

SEQ ID NO: 7409 - protein, 4 aa, synthetic construct
KTIP

SEQ ID NO: 7410 - protein, 4 aa, synthetic construct
KTIH

SEQ ID NO: 7411 - protein, 18 aa, synthetic construct
KTINGSGSPHSKAQNQQT

SEQ ID NO: 7412 - protein, 5 aa, synthetic construct
NPHKS

SEQ ID NO: 7413 - protein, 6 aa, synthetic construct
NPHKSG

SEQ ID NO: 7414 - protein, 6 aa, synthetic construct
SPHKIV

SEQ ID NO: 7415 - protein, 6 aa, synthetic construct
GHDNPH

SEQ ID NO: 7416 - protein, 6 aa, synthetic construct
AHDSPH

SEQ ID NO: 7417 - protein, 6 aa, synthetic construct
KHDSPH

SEQ ID NO: 7418 - protein, 6 aa, synthetic construct
WHDSPH

SEQ ID NO: 7419 - protein, 6 aa, synthetic construct
RHDSPH

SEQ ID NO: 7420 - protein, 6 aa, synthetic construct
LHDSPH

SEQ ID NO: 7421 - protein, 6 aa, synthetic construct
IHDSPH

SEQ ID NO: 7422 - protein, 6 aa, synthetic construct
MHDSPH

SEQ ID NO: 7423 - protein, 6 aa, synthetic construct
NHDSPH

SEQ ID NO: 7424 - protein, 6 aa, synthetic construct
THDSPH

SEQ ID NO: 7425 - protein, 6 aa, synthetic construct
EHDSPH

SEQ ID NO: 7426 - protein, 6 aa, synthetic construct
QHDSPH

SEQ ID NO: 7427 - protein, 6 aa, synthetic construct
YHDSPH

SEQ ID NO: 7428 - protein, 6 aa, synthetic construct
HHDSPH

SEQ ID NO: 7429 - protein, 6 aa, synthetic construct
FHDSPH

SEQ ID NO: 7430 - protein, 6 aa, synthetic construct
VHDSPH

SEQ ID NO: 7431 - protein, 9 aa, synthetic construct
GHDNPHKSG

SEQ ID NO: 7432 - protein, 9 aa, synthetic construct
AHDSPHKSG

SEQ ID NO: 7433 - protein, 9 aa, synthetic construct
AHDSPHKIG

SEQ ID NO: 7434 - protein, 9 aa, synthetic construct
KHDSPHKSG

SEQ ID NO: 7435 - protein, 9 aa, synthetic construct
WHDSPHKSG

SEQ ID NO: 7436 - protein, 9 aa, synthetic construct
RHDSPHKSG

SEQ ID NO: 7437 - protein, 9 aa, synthetic construct
LHDSPHKSG

SEQ ID NO: 7438 - protein, 9 aa, synthetic construct
IHDSPHKSG

SEQ ID NO: 7439 - protein, 9 aa, synthetic construct
MHDSPHKSG

SEQ ID NO: 7440 - protein, 9 aa, synthetic construct
NHDSPHKSG

SEQ ID NO: 7441 - protein, 9 aa, synthetic construct
THDSPHKSG

SEQ ID NO: 7442 - protein, 9 aa, synthetic construct
EHDSPHKSG

SEQ ID NO: 7443 - protein, 9 aa, synthetic construct
QHDSPHKSG

SEQ ID NO: 7444 - protein, 9 aa, synthetic construct
RHDSPHKIV

SEQ ID NO: 7445 - protein, 9 aa, synthetic construct
YHDSPHKSG

SEQ ID NO: 7446 - protein, 9 aa, synthetic construct
HHDSPHKSG

SEQ ID NO: 7447 - protein, 9 aa, synthetic construct
FHDSPHKSG

SEQ ID NO: 7448 - protein, 9 aa, synthetic construct
VHDSPHKSG

SEQ ID NO: 7449 - protein, 5 aa, synthetic construct
QIRQT

SEQ ID NO: 7450 - protein, 5 aa, synthetic construct
QNQHA

SEQ ID NO: 7451 - protein, 5 aa, synthetic construct
QSVQT

SEQ ID NO: 7452 - protein, 5 aa, synthetic construct
RSQQT

SEQ ID NO: 7453 - protein, 5 aa, synthetic construct
QNKLE

SEQ ID NO: 7454 - protein, 5 aa, synthetic construct
QNQQK

SEQ ID NO: 7455 - protein, 5 aa, synthetic construct
QHQQA

SEQ ID NO: 7456 - protein, 5 aa, synthetic construct
QIQHT

SEQ ID NO: 7457 - protein, 5 aa, synthetic construct
PRQQT

SEQ ID NO: 7458 - protein, 5 aa, synthetic construct
HTQQT

SEQ ID NO: 7459 - protein, 5 aa, synthetic construct
QRQHT

SEQ ID NO: 7460 - protein, 5 aa, synthetic construct
QNQQS

SEQ ID NO: 7461 - protein, 5 aa, synthetic construct
RNQET

SEQ ID NO: 7462 - protein, 5 aa, synthetic construct
KNQQT

SEQ ID NO: 7463 - protein, 5 aa, synthetic construct
QTQQT

SEQ ID NO: 7464 - protein, 5 aa, synthetic construct
QTQQI

SEQ ID NO: 7465 - protein, 5 aa, synthetic construct
QSKQA

SEQ ID NO: 7466 - protein, 5 aa, synthetic construct
QNQPP

SEQ ID NO: 7467 - protein, 5 aa, synthetic construct
QSPQT

SEQ ID NO: 7468 - protein, 5 aa, synthetic construct
QNQQG

SEQ ID NO: 7469 - protein, 5 aa, synthetic construct
QNQHT

SEQ ID NO: 7470 - protein, 5 aa, synthetic construct
QTRQT

SEQ ID NO: 7471 - protein, 5 aa, synthetic construct
QNLHT

SEQ ID NO: 7472 - protein, 5 aa, synthetic construct
QNQET

SEQ ID NO: 7473 - protein, 5 aa, synthetic construct
LNQPT

SEQ ID NO: 7474 - protein, 5 aa, synthetic construct
QNQDT

SEQ ID NO: 7475 - protein, 5 aa, synthetic construct
RNQQT

SEQ ID NO: 7476 - protein, 5 aa, synthetic construct
QNLLT

SEQ ID NO: 7477 - protein, 5 aa, synthetic construct
QLVIT

SEQ ID NO: 7478 - protein, 5 aa, synthetic construct
RTQET

SEQ ID NO: 7479 - protein, 5 aa, synthetic construct
QTHQT

SEQ ID NO: 7480 - protein, 5 aa, synthetic construct
QNQPA

SEQ ID NO: 7481 - protein, 5 aa, synthetic construct
QDQHT

SEQ ID NO: 7482 - protein, 5 aa, synthetic construct
QSQHT

SEQ ID NO: 7483 - protein, 5 aa, synthetic construct
RNQQI

SEQ ID NO: 7484 - protein, 5 aa, synthetic construct
VRQQT

SEQ ID NO: 7485 - protein, 5 aa, synthetic construct
QNQHS

SEQ ID NO: 7486 - protein, 5 aa, synthetic construct
AWQQT

SEQ ID NO: 7487 - protein, 5 aa, synthetic construct
QSVPT

SEQ ID NO: 7488 - protein, 5 aa, synthetic construct
QNIQP

SEQ ID NO: 7489 - protein, 5 aa, synthetic construct
QNHLN

SEQ ID NO: 7490 - protein, 5 aa, synthetic construct
LDQQT

SEQ ID NO: 7491 - protein, 5 aa, synthetic construct
PDQQS

SEQ ID NO: 7492 - protein, 5 aa, synthetic construct
ESQQT

SEQ ID NO: 7493 - protein, 5 aa, synthetic construct
QNKQT

SEQ ID NO: 7494 - protein, 5 aa, synthetic construct
QRQLT

SEQ ID NO: 7495 - protein, 5 aa, synthetic construct
QIIVT

SEQ ID NO: 7496 - protein, 5 aa, synthetic construct
QKQST

SEQ ID NO: 7497 - protein, 5 aa, synthetic construct
QSHQT

SEQ ID NO: 7498 - protein, 5 aa, synthetic construct
QFVVT

SEQ ID NO: 7499 - protein, 5 aa, synthetic construct
QSQPT

SEQ ID NO: 7500 - protein, 5 aa, synthetic construct
QNEQT

SEQ ID NO: 7501 - protein, 5 aa, synthetic construct
RNRQT

SEQ ID NO: 7502 - protein, 5 aa, synthetic construct
QSKQT

SEQ ID NO: 7503 - protein, 5 aa, synthetic construct
QNPLT

SEQ ID NO: 7504 - protein, 5 aa, synthetic construct
RDQKT

SEQ ID NO: 7505 - protein, 5 aa, synthetic construct
HNQQN

SEQ ID NO: 7506 - protein, 5 aa, synthetic construct
QWKRT

SEQ ID NO: 7507 - protein, 5 aa, synthetic construct
QNHQI

SEQ ID NO: 7508 - protein, 5 aa, synthetic construct
QNQQA

SEQ ID NO: 7509 - protein, 5 aa, synthetic construct
QNQLN

SEQ ID NO: 7510 - protein, 5 aa, synthetic construct
QTQPT

SEQ ID NO: 7511 - protein, 5 aa, synthetic construct
QKQLT

SEQ ID NO: 7512 - protein, 5 aa, synthetic construct
RNQLA

SEQ ID NO: 7513 - protein, 5 aa, synthetic construct
RNQQS

SEQ ID NO: 7514 - protein, 5 aa, synthetic construct
ISIQT

SEQ ID NO: 7515 - protein, 5 aa, synthetic construct
QNQQN

SEQ ID NO: 7516 - protein, 5 aa, synthetic construct
QSQQS

SEQ ID NO: 7517 - protein, 5 aa, synthetic construct
QTVCT

SEQ ID NO: 7518 - protein, 5 aa, synthetic construct
QYQQI

SEQ ID NO: 7519 - protein, 5 aa, synthetic construct
QQIMT

SEQ ID NO: 7520 - protein, 5 aa, synthetic construct
QNEQS

SEQ ID NO: 7521 - protein, 5 aa, synthetic construct
LNHQT

SEQ ID NO: 7522 - protein, 5 aa, synthetic construct
QMIHT

SEQ ID NO: 7523 - protein, 5 aa, synthetic construct
RNHQS

SEQ ID NO: 7524 - protein, 5 aa, synthetic construct
QKMNT

SEQ ID NO: 7525 - protein, 5 aa, synthetic construct
QSQQN

SEQ ID NO: 7526 - protein, 4 aa, synthetic construct
KSIY

SEQ ID NO: 7527 - protein, 4 aa, synthetic construct
KIIN

SEQ ID NO: 7528 - protein, 4 aa, synthetic construct
KAII

SEQ ID NO: 7529 - protein, 4 aa, synthetic construct
KAIS

SEQ ID NO: 7530 - protein, 4 aa, synthetic construct
KTVD

SEQ ID NO: 7531 - protein, 4 aa, synthetic construct
KTIE

SEQ ID NO: 7532 - protein, 4 aa, synthetic construct
KTIY

SEQ ID NO: 7533 - protein, 4 aa, synthetic construct
KNVV

SEQ ID NO: 7534 - protein, 4 aa, synthetic construct
KTDA

SEQ ID NO: 7535 - protein, 4 aa, synthetic construct
KTEM

SEQ ID NO: 7536 - protein, 4 aa, synthetic construct
KIVN

SEQ ID NO: 7537 - protein, 4 aa, synthetic construct
KIGN

SEQ ID NO: 7538 - protein, 4 aa, synthetic construct
KEVM

SEQ ID NO: 7539 - protein, 4 aa, synthetic construct
KYQV

SEQ ID NO: 7540 - protein, 4 aa, synthetic construct
KTVE

SEQ ID NO: 7541 - protein, 4 aa, synthetic construct
KAID

SEQ ID NO: 7542 - protein, 4 aa, synthetic construct
KTIM

SEQ ID NO: 7543 - protein, 4 aa, synthetic construct
KEVG

SEQ ID NO: 7544 - protein, 4 aa, synthetic construct
KSEM

SEQ ID NO: 7545 - protein, 4 aa, synthetic construct
KAQQ

SEQ ID NO: 7546 - protein, 4 aa, synthetic construct
KCGE

SEQ ID NO: 7547 - protein, 4 aa, synthetic construct
KASN

SEQ ID NO: 7548 - protein, 4 aa, synthetic construct
KTIG

SEQ ID NO: 7549 - protein, 4 aa, synthetic construct
KTDP

SEQ ID NO: 7550 - protein, 4 aa, synthetic construct
KELV

SEQ ID NO: 7551 - protein, 4 aa, synthetic construct
KELM

SEQ ID NO: 7552 - protein, 4 aa, synthetic construct
KNEI

SEQ ID NO: 7553 - protein, 4 aa, synthetic construct
KTPN

SEQ ID NO: 7554 - protein, 4 aa, synthetic construct
KITN

SEQ ID NO: 7555 - protein, 4 aa, synthetic construct
KTDI

SEQ ID NO: 7556 - protein, 4 aa, synthetic construct
KTDQ

SEQ ID NO: 7557 - protein, 4 aa, synthetic construct
KGIN

SEQ ID NO: 7558 - protein, 4 aa, synthetic construct
KSEI

SEQ ID NO: 7559 - protein, 4 aa, synthetic construct
KWSA

SEQ ID NO: 7560 - protein, 4 aa, synthetic construct
KELA

SEQ ID NO: 7561 - protein, 4 aa, synthetic construct
KQTQ

SEQ ID NO: 7562 - protein, 4 aa, synthetic construct
KGAD

SEQ ID NO: 7563 - protein, 4 aa, synthetic construct
KVGE

SEQ ID NO: 7564 - protein, 4 aa, synthetic construct
KANE

SEQ ID NO: 7565 - protein, 4 aa, synthetic construct
KTDT

SEQ ID NO: 7566 - protein, 4 aa, synthetic construct
KTCI

SEQ ID NO: 7567 - protein, 4 aa, synthetic construct
KELR

SEQ ID NO: 7568 - protein, 4 aa, synthetic construct
KCQI

SEQ ID NO: 7569 - protein, 4 aa, synthetic construct
KGVM

SEQ ID NO: 7570 - protein, 4 aa, synthetic construct
KACD

SEQ ID NO: 7571 - protein, 4 aa, synthetic construct
KNEL

SEQ ID NO: 7572 - protein, 4 aa, synthetic construct
KAAE

SEQ ID NO: 7573 - protein, 4 aa, synthetic construct
KGQN

SEQ ID NO: 7574 - protein, 4 aa, synthetic construct
KNEF

SEQ ID NO: 7575 - protein, 4 aa, synthetic construct
KTSI

SEQ ID NO: 7576 - protein, 4 aa, synthetic construct
KCDQ

SEQ ID NO: 7577 - protein, 4 aa, synthetic construct
KEIL

SEQ ID NO: 7578 - protein, 4 aa, synthetic construct
KTPD

SEQ ID NO: 7579 - protein, 18 aa, synthetic construct
KTINGHDSPHKSGQNQQT

SEQ ID NO: 7580 - protein, 4 aa, synthetic construct
SPHK

SEQ ID NO: 7581 - protein, 11 aa, synthetic construct
ERVSGSPHSKA

SEQ ID NO: 7582 - protein, 12 aa, synthetic construct
AEIGHDSPHKSG

SEQ ID NO: 7583 - protein, 27 aa, synthetic construct
KTINGSGQNQQTLKFSVAGPSNMAVQG

SEQ ID NO: 7584 - protein, 12 aa, synthetic construct
KTINGSGQNQQT

SEQ ID NO: 7585 - protein, 9 aa, synthetic construct
NGSGQNQQT

SEQ ID NO: 7586 - protein, 12 aa, synthetic construct
SPHSKSSPHWKA

SEQ ID NO: 7587 - protein, 40 aa, synthetic construct; identical to SEQ ID NO: 4542
  VARIANT 1..40: note = This sequence may encompass 0-8 GGGGS repeating units

SEQ ID NO: 7588 - DNA, 4047 bp, synthetic construct
  source 1..4047: mol_type = other DNA
ctgcgcgctcgctcgctcactgaggccgcccgggcaaagcccgggcgtcgggcgacctttggtcgcccggcctcagtgagcgagcgagcgcgcagagagggagtggccaactccatcactaggggttccttgtagttaatgattaacccgccatgctacttatctaccagggtaatggggatcctctagaactatagctagtcgacataacgcgtgatctaacatatcctggtgtggagtagcggacgctgctatgacagaggctcgggggcctgagctggctctgtgagctggggaggaggcagacagccaggccttgtctgcaagcagacctggcagcattgggctggccgccccccagggcctcctcttcatgcccagtgaatgactcaccttggcacagacacaatgttcggggtgggcacagtgcctgcttcccgccgcaccccagcccccctcaaatgccttccgagaagcccattgagcagggggcttgcattgcaccccagcctgacagcctggcatcttgggataaaagcagcacagccccctaggggctgcccttgctgtgtggcgccaccggcggtggagaacaaggctctattcagcctgtgcccaggaaaggggatcaggggatgcccaggcatggacagtgggtggcagggggggagaggagggctgtctgcttcccagaagtccaaggacacaaatgggtgaggggagagctctccccatagctgggctgcggcccaaccccaccccctcaggctatgccagggggtgttgccaggggcacccgggcatcgccagtctagcccactccttcataaagccctcgcatcccaggagcgagcagagccagagcaggttggagaggagacgcatcacctccgctgctcgcggggatcctctagaagcttcgtttagtgaaccgtcagatcgcctggagacgccatccacgctgttttgacctccatagaagacaccgggaccgatccagcctccgcggattcgaatcccggccgggaacggtgcattggaacgcggattccccgtgccaagagtgacgtaagtaccgcctatagagtctataggcccacaaaaaatgctttcttcttttaatatacttttttgtttatcttatttctaatactttccctaatctctttctttcagggcaataatgatacaatgtatcatgcctctttgcaccattctaaagaataacagtgataatttctgggttaaggcaatagcaatatttctgcatataaatatttctgcatataaattgtaactgatgtaagaggtttcatattgctaatagcagctacaatccagctaccattctgcttttattttatggttgggataaggctggattattctgagtccaagctaggcccttttgctaatcatgttcatacctcttatcttcctcccacagctcctgggcaacgtgctggtctgtgtgctggcccatcactttggcaaagaattgggattcgaaccggtgccgccaccatggactggacctggaggttcctctttgtggtggcagcagctacaggtgtccagtctgaggttcagctggtggagtctggaggtggcctggtgcagccagggggctcactcagattgtcctgtgcagcttctggcttcaacattaaagacacctatatacactgggtgagacaggccccaggtaagggcctggaatgggttgcaaggatttatcctaccaatggttatactagatatgctgattctgtcaagggcagattcactatatctgcagacacatccaaaaacacagcctacctgcagatgaacagcctgagagctgaggacactgctgtctattattgttctagatggggaggggatggcttctatgctatggactactggggtcaaggaaccctggtcacagtctcctctgcctctaccaagggcccatctgtcttccccctggcaccctcctccaagagcacctctgggggcacagctgccctgggctgcctggtcaaggactacttccctgaacctgtgacagtctcctggaactcaggagccctgaccagtggagtgcacaccttccctgctgtcctacagtcctcaggactctactccctcagctctgtggtgacagtgccctccagcagcttgggcacccagacctacatctgcaatgtgaatcacaagcccagcaacaccaaggtggacaagagagttgagcccaaatcttgtgacaaaactcacacatgcccaccttgcccagcacctgaactggtggggggaccatcagtcttcctcctccccccaaaacccaaggacaccctcatggcatccagaacccctgaggtcacatgtgtggtggtggatgtgagccatgaagaccctgaggtcaagttcaactggtatgtggatggagtggaggtgcataatgccaagacaaagccccctgaggagcagtacaacagcactctcagagtggtctctgtcctcacagtcctggcccaggactggctgaatggcaaggagtacaagtgcaaggtctccaacaaagccctcccagcccccattgagaaaaccatctccaaagccaaagggcagcccagagaaccacaggtgtacaccctgcccccatccagagatgagctgaccaagaaccaggtcagcctgacctgcctggtcaaaggcttctatccctctgacattgctgtggagtgggagagcaatgggcagcctgagaacaactacaagaccacacctcttgtgctggactctgatggctccttcttcctctacagcaagctcacagtggacaagagcagatggcagcaggggaatgtcttctcatgctctgtgatgcatgaggctctgcacaacgcttacacccagaagagcctctccctgtctccaggtaaaagaaagaggagagagggcagaggaagtcttctaacatgtggtgatgtggaggagaatcctggccctatggacatgagggtccctgctcagctcctggggctcctgctgctctggctctcaggtgccagatgtgatatccagatgacccagtcccctagctccctgtctgcctctgtgggagatagggtcaccatcacctgtagagccagtcaggatgtgaatactgctgtagcctggtatcaacagaaaccaggaaaagctcctaaactactgatttactctgcatccttcctctactctggagtcccttctaggttctctggatccagatctgggactgatttcactctgaccatcagcagtctgcagccagaagactttgcaacttattactgtcagcaacattatactactcctcccacttttggacagggtaccaaggtggagatcaaaagaactgtggctgcaccatctgtcttcatcttcccaccatctgatgagcagttgaaatctggaactgcctctgttgtgtgcctgctgaataacttctatcccagagaggccaaagtacagtggaaggtggataatgccctccaatcaggtaactcccaggagagtgtcacagagcaggacagcaaggacagcacctacagcctcagcagcaccctgactctgagcaaagcagactatgagaaacacaaagtctatgcctgtgaagtcacccatcagggcctgagctctcctgtcacaaagagcttcaacaggggagagtgttagtagtaactcgaggacggggtgaactacgcctgaggatccgatctttttccctctgccaaaaattatggggacatcatgaagccccttgagcatctgacttctggctaataaaggaaatttattttcattgcaatagtgtgttggaattttttgtgtctctcactcggcctaggtagataagtagcatggcgggttaatcattaactacaaggaacccctagtgatggagttggccactccctctctgcgcgctcgctcgctcactgaggccgggcgaccaaaggtcgcccgacgcccgggctttgcccgggcggcctcagtgagcgagcgagcgcgcag

SEQ ID NO: 7589 - protein, 450 aa, synthetic construct
EVQLVESGGGLVQPGGSLRLSCAASGFNIKDTYIHWVRQAPGKGLEWVARIYPTNGYTRYADSVKGRFTISADTSKNTAYLQMNSLRAEDTAVYYCSRWGGDGFYAMDYWGQGTLVTVSSASTKGPSVFPLAPSSKSTSGGTAALGCLVKDYFPEPVTVSWNSGALTSGVHTFPAVLQSSGLYSLSSVVTVPSSSLGTQTYICNVNHKPSNTKVDKRVEPKSCDKTHTCPPCPAPELVGGPSVFLLPPKPKDTLMASRTPEVTCVVVDVSHEDPEVKFNWYVDGVEVHNAKTKPPEEQYNSTLRVVSVLTVLAQDWLNGKEYKCKVSNKALPAPIEKTISKAKGQPREPQVYTLPPSRDELTKNQVSLTCLVKGFYPSDIAVEWESNGQPENNYKTTPLVLDSDGSFFLYSKLTVDKSRWQQGNVFSCSVMHEALHNAYTQKSLSLSPGK

SEQ ID NO: 7590 - DNA, 1350 bp, synthetic construct
  source 1..1350: mol_type = other DNA
gaggttcagctggtggagtctggaggtggcctggtgcagccagggggctcactcagattgtcctgtgcagcttctggcttcaacattaaagacacctatatacactgggtgagacaggccccaggtaagggcctggaatgggttgcaaggatttatcctaccaatggttatactagatatgctgattctgtcaagggcagattcactatatctgcagacacatccaaaaacacagcctacctgcagatgaacagcctgagagctgaggacactgctgtctattattgttctagatggggaggggatggcttctatgctatggactactggggtcaaggaaccctggtcacagtctcctctgcctctaccaagggcccatctgtcttccccctggcaccctcctccaagagcacctctgggggcacagctgccctgggctgcctggtcaaggactacttccctgaacctgtgacagtctcctggaactcaggagccctgaccagtggagtgcacaccttccctgctgtcctacagtcctcaggactctactccctcagctctgtggtgacagtgccctccagcagcttgggcacccagacctacatctgcaatgtgaatcacaagcccagcaacaccaaggtggacaagagagttgagcccaaatcttgtgacaaaactcacacatgcccaccttgcccagcacctgaactggtggggggaccatcagtcttcctcctccccccaaaacccaaggacaccctcatggcatccagaacccctgaggtcacatgtgtggtggtggatgtgagccatgaagaccctgaggtcaagttcaactggtatgtggatggagtggaggtgcataatgccaagacaaagccccctgaggagcagtacaacagcactctcagagtggtctctgtcctcacagtcctggcccaggactggctgaatggcaaggagtacaagtgcaaggtctccaacaaagccctcccagcccccattgagaaaaccatctccaaagccaaagggcagcccagagaaccacaggtgtacaccctgcccccatccagagatgagctgaccaagaaccaggtcagcctgacctgcctggtcaaaggcttctatccctctgacattgctgtggagtgggagagcaatgggcagcctgagaacaactacaagaccacacctcttgtgctggactctgatggctccttcttcctctacagcaagctcacagtggacaagagcagatggcagcaggggaatgtcttctcatgctctgtgatgcatgaggctctgcacaacgcttacacccagaagagcctctccctgtctccaggtaaa

SEQ ID NO: 7591 - DNA, 990 bp, synthetic construct
  source 1..990: mol_type = other DNA
gcctctaccaagggcccatctgtcttccccctggcaccctcctccaagagcacctctgggggcacagctgccctgggctgcctggtcaaggactacttccctgaacctgtgacagtctcctggaactcaggagccctgaccagtggagtgcacaccttccctgctgtcctacagtcctcaggactctactccctcagctctgtggtgacagtgccctccagcagcttgggcacccagacctacatctgcaatgtgaatcacaagcccagcaacaccaaggtggacaagagagttgagcccaaatcttgtgacaaaactcacacatgcccaccttgcccagcacctgaactggtggggggaccatcagtcttcctcctccccccaaaacccaaggacaccctcatggcatccagaacccctgaggtcacatgtgtggtggtggatgtgagccatgaagaccctgaggtcaagttcaactggtatgtggatggagtggaggtgcataatgccaagacaaagccccctgaggagcagtacaacagcactctcagagtggtctctgtcctcacagtcctggcccaggactggctgaatggcaaggagtacaagtgcaaggtctccaacaaagccctcccagcccccattgagaaaaccatctccaaagccaaagggcagcccagagaaccacaggtgtacaccctgcccccatccagagatgagctgaccaagaaccaggtcagcctgacctgcctggtcaaaggcttctatccctctgacattgctgtggagtgggagagcaatgggcagcctgagaacaactacaagaccacacctcttgtgctggactctgatggctccttcttcctctacagcaagctcacagtggacaagagcagatggcagcaggggaatgtcttctcatgctctgtgatgcatgaggctctgcacaacgcttacacccagaagagcctctccctgtctccaggtaaa

SEQ ID NO: 7592 - protein, 330 aa, synthetic construct
ASTKGPSVFPLAPSSKSTSGGTAALGCLVKDYFPEPVTVSWNSGALTSGVHTFPAVLQSSGLYSLSSVVTVPSSSLGTQTYICNVNHKPSNTKVDKRVEPKSCDKTHTCPPCPAPELVGGPSVFLLPPKPKDTLMASRTPEVTCVVVDVSHEDPEVKFNWYVDGVEVHNAKTKPPEEQYNSTLRVVSVLTVLAQDWLNGKEYKCKVSNKALPAPIEKTISKAKGQPREPQVYTLPPSRDELTKNQVSLTCLVKGFYPSDIAVEWESNGQPENNYKTTPLVLDSDGSFFLYSKLTVDKSRWQQGNVFSCSVMHEALHNAYTQKSLSLSPGK

SEQ ID NO: 7593 - protein, 11 aa, synthetic construct
ENVSGSPHSKA
